(19) United States
(12) Patent Application Publication
(10) Pub. No.: US 2012/0190089 A1
(43) Pub. Date: Jul. 26, 2012

(54) ENGINEERED MICROOGRANISMS CAPABLE OF PRODUCING TARGET COMPOUNDS UNDER ANAEROBIC CONDITIONS

(75) Inventors: Thomas Buelter, Denver, CO (US); Peter Meinhold, Denver, CO (US); Reid M. Renny Feldman, San Francisco, CA (US); Andrew C. Hawkins, Parker, CO (US); Sabine Bastian, Pasadena, CA (US); Frances Arnold, La Canada, CA (US); Jun Urano, Aurora, CA (US)

(73) Assignees: California Institute of Technology, Pasadena, CA (US); Gevo, Inc., Englewood, CO (US)

(21) Appl. No.: 13/303,884

(22) Filed: Nov. 23, 2011

Related U.S. Application Data
(63) Continuation-in-part of application No. 12/610,784, filed on Nov. 2, 2009.
(60) Provisional application No. 61/110,543, filed on Oct. 31, 2008.
(60) Provisional application No. 61/121,830, filed on Dec. 11, 2008.
(60) Provisional application No. 61/184,580, filed on Jun. 5, 2009.
(60) Provisional application No. 61/184,605, filed on Jun. 5, 2009.
(60) Provisional application No. 61/239,618, filed on Sep. 3, 2009.

(51) Int. Cl. C12P 7/16; C12N 1/19

(52) U.S. Cl. 435/160; 435/254.21; 435/254.22; 435/254.23; 435/254.2

(57) ABSTRACT

The present invention is generally provides recombinant microorganisms comprising engineered metabolic pathways capable of producing C3-C5 alcohols under aerobic and anaerobic conditions. The invention further provides ketol-acid reductoisomerase enzymes which have been mutated or modified to increase their NADH-dependent activity or to switch the cofactor preference from NADPH to NADH and are expressed in the modified microorganisms. In addition, the invention provides isobutyraldehyde dehydrogenase enzymes expressed in modified microorganisms. Also provided are methods of producing beneficial metabolites under aerobic and anaerobic conditions by contacting a suitable substrate with the modified microorganisms of the present invention.

### CROSS-REFERENCE TO RELATED APPLICATIONS

[0001] This application is a continuation-in-part appliation of U.S. application Ser. No. 12/610,784, filed Nov. 2, 2009, which claims priority to U.S. Provisional Application Ser. No. 61/110,543, filed Oct. 31, 2008; U.S. Provisional Application Ser. No. 61/121,830, filed Dec. 11, 2008; U.S. Provisional Application Ser. No. 61/184,580, filed Jun. 5, 2009; U.S. Provisional Application Ser. No. 61/184,605, filed Jun. 5, 2009; and U.S. Provisional Application Ser. No. 61/239,618, filed Sep. 3, 2009, all of which are herein incorporated by reference in their entireties for all purposes.

### STATEMENT REGARDING FEDERALLY FUNDED RESEARCH

[0002] This invention was made with government support under contract DE-FG02-07ER84893, awarded by the Department of Energy, and contract W911NF-09-2-0022, awarded by the United States Army Research Laboratory. The government has certain rights in the invention.

### DESCRIPTION OF THE TEXT FILE SUBMITTED ELECTRONICALLY

[0003] The contents of the text file submitted electronically herewith are incorporated herein by reference in their entirety: A computer readable format copy of the Sequence Listing (filename: GEVO_{—}018_{—}06US_SeqList.txt, date recorded: Nov. 3, 2011, file size: 1.98 megabytes).

### FIELD OF THE INVENTION

[0004] The present invention is generally related to genetically engineered microorganisms, methods of producing such organisms, and methods of using such organisms for the production of beneficial metabolites, including C3-C5 alcohols such as isobutanol.

### BACKGROUND

[0005] Biofuels have a long history ranging back to the beginning of the 20th century. As early as 1900, Rudolf Diesel demonstrated at the World Exhibition in Paris, France, an engine running on peanut oil. Soon thereafter, Henry Ford demonstrated his Model T running on ethanol derived from corn. Petroleum-derived fuels displaced biofuels in the 1930s and 1940s due to increased supply, and efficiency at a lower cost.

[0006] Market fluctuations in the 1970s coupled to the decrease in US oil production led to an increase in crude oil prices and a renewed interest in biofuels. Today, many interest groups, including policy makers, industry planners, aware citizens, and the financial community, are interested in substituting petroleum-derived fuels with biomass-derived biofuels. The leading motivations for developing biofuels are of economical, political, and environmental nature.

[0007] One is the threat of ‘peak oil’, the point at which the consumption rate of crude oil exceeds the supply rate, thus leading to significantly increased fuel cost results in an increased demand for alternative fuels. In addition, instability in the Middle East and other oil-rich regions has increased the demand for domestically produced biofuels. Also, environmental concerns relating to the possibility of carbon dioxide related climate change is an important social and ethical driving force which is starting to result in government regulations and policies such as caps on carbon dioxide emissions from automobiles, taxes on carbon dioxide emissions, and tax incentives for the use of biofuels.

[0008] Ethanol is the most abundant biofuel today but has several drawbacks when compared to gasoline. Butanol, in comparison, has several advantages over ethanol as a fuel: it can be made from the same feedstocks as ethanol but, unlike ethanol, it is compatible with gasoline at any ratio and can also be used as a pure fuel in existing combustion engines without modifications. Unlike ethanol, butanol does not absorb water and can thus be stored and distributed in the existing petrochemical infrastructure. Due to its higher energy content which is close to that of gasoline, the fuel economy (miles per gallon) is better than that of ethanol. Also, butanol-gasoline blends have lower vapor pressure than ethanol-gasoline blends, which is important in reducing evaporative hydrocarbon emissions.

[0009] Isobutanol has the same advantages as butanol with the additional advantage of having a higher octane number due to its branched carbon chain. Isobutanol is also useful as a commodity chemical. For example, it is used as the starting material in the manufacture of isobutyl acetate, which is primarily used for the production of lacquer and similar coatings. In addition, isobutanol finds utility in the industrial synthesis of derivative esters. Isobutyl esters such as diisobutyl phthalate (DIBP) are used as plasticizer agents in plastics, rubbers, and other dispersions.

[0010] A number of recent publications have described methods for the production of industrial chemicals such as isobutanol using engineered microorganisms. See, e.g., WO/2007/050671 to Donaldson et al., and WO/2008/098227 to Liao et al., which are herein incorporated by reference in their entireties. These publications disclose recombinant microorganisms that utilize a series of heterologously expressed enzymes to convert sugars into isobutanol. However, the production of isobutanol using these microorganisms is feasible only under aerobic conditions and the maximum yield that can be achieved is limited.

[0011] There is a need, therefore, to provide modified microorganisms capable of producing isobutanol under anaerobic conditions and at close to theoretical yield. The present invention addresses this need by providing modified microorganisms capable of producing isobutanol under anaerobic conditions and at high yields.

### SUMMARY OF THE INVENTION

[0012] The present invention provides recombinant microorganisms comprising an engineered metabolic pathway capable of producing one or more C3-C5 alcohols under aerobic and anaerobic conditions. In a preferred embodiment, the recombinant microorganism produces the C3-C5 alcohol under anaerobic conditions at a rate higher than a parental microorganism comprising a native or unmodified metabolic pathway. In another preferred embodiment, the recombinant microorganism produces the C3-C5 alcohol under anaerobic conditions at a rate of at least about 2-fold higher than a parental microorganism comprising a native or unmodified metabolic pathway. In another preferred embodiment, the recombinant microorganism produces the C3-C5 alcohol under anaerobic conditions at a rate of at least about 10-fold, of at least about 50-fold, or of at least about 100-fold higher than a parental microorganism comprising a native or unmodified metabolic pathway.

[0013] In various embodiments described herein, the C3-C5 alcohol may be selected from 1-propanol, 2-propanol, 1-butanol, 2-butanol, isobutanol, 2-methyl-1-butanol, 3-methyl-1-butanol, and 1-pentanol. In a preferred embodiment, the C3-C5 alcohol is isobutanol. In another preferred embodiment, isobutanol is produced at a specific productivity of at least about 0.025 g l⁻¹ h⁻¹ OD⁻¹.

[0014] In one aspect, there are provided recombinant microorganisms comprising an engineered metabolic pathway for producing one or more C3-C5 alcohols under anaerobic and aerobic conditions that comprises an overexpressed transhydrogenase that converts NADH to NADPH. In one embodiment, the transhydrogenase is a membrane-bound transhydrogenase. In a specific embodiment, the membrane-bound transhydrogenase is encoded by the E. coli pntAB genes or homologues thereof.

[0015] In another aspect, there are provided recombinant microorganisms comprising an engineered metabolic pathway for producing one or more C3-C5 alcohols under anaerobic and aerobic conditions that comprises an NADPH-dependent glyceraldehyde-3-phosphate dehydrogenase. In one embodiment, the NADPH-dependent glyceraldehyde-3-phosphate dehydrogenase is encoded by the Clostridium acetobutylicum gapC gene. In another embodiment, the NADPH-dependent glyceraldehyde-3-phosphate dehydrogenase is encoded by the Kluyveromyces lactis GDP1 gene.

[0016] In yet another aspect, there are provided recombinant microorganisms comprising an engineered metabolic pathway for producing one or more C3-C5 alcohols under anaerobic and aerobic conditions that comprises one or more enzymes catalyzing conversions in said engineered metabolic pathway that are not catalyzed by glyceraldehyde-3-phosphate dehydrogenase, and wherein said one or more enzymes have increased activity using NADH as a cofactor. In one embodiment, said one or more enzymes are selected from an NADH-dependent ketol-acid reductoisomerase (a ketol-acid reductoisomerase may hereinafter be abbreviated as “KARI”) and an NADH-dependent alcohol dehydrogenase (an alcohol dehydrogenase may hereinafter be abbreviated as “ADH”). In various embodiments described herein, the KARI and/or ADH enzymes may be engineered to have increased activity with NADH as the cofactor as compared to the wild-type E. coli KARI IlvC and a native E. coli ADH YqhD, respectively. In some embodiments, the KARI and/or the ADH are modified or mutated to be NADH-dependent. In other embodiments, the KARI and/or ADH enzymes are identified in nature with increased activity with NADH as the cofactor as compared to the wild-type E. coli KARI IlvC and a native E. coli ADH YqhD, respectively.

[0017] In various embodiments described herein, the KARI and/or ADH may show at least a 10-fold higher catalytic efficiency using NADH as a cofactor as compared to the wild-type E. coli KARI IlvC and the native ADH YqhD, respectively. In a preferred embodiment, the KARI enhances the recombinant microorganism's ability to convert acetolactate to 2,3-dihydroxyisovalerate under anaerobic conditions. In another embodiment, the KARI enhances the recombinant microorganism's ability to utilize NADH from the conversion of acetolactate to 2,3-dihydroxyisovalerate.

[0018] The present invention also provides modified or mutated KARI enzymes that preferentially utilize NADH rather than NADPH, and recombinant microorganisms comprising said modified or mutated KARI enzymes. In general, these modified or mutated KARI enzymes may enhance the cell's ability to produce beneficial metabolites such as isobutanol and enable the production of beneficial metabolites such as isobutanol under anaerobic conditions.

[0019] In certain aspects, the invention includes KARIs which have been modified or mutated to increase the ability to utilize NADH. Examples of such KARIs include enzymes having one or more modifications or mutations at positions corresponding to amino acids selected from the group consisting of: (a) alanine 71 of the wild-type E. coli IlvC (SEQ ID NO: 13); (b) arginine 76 of the wild-type E. coli IlvC; (c) serine 78 of the wild-type E. coli IlvC; and (d) glutamine 110 of the wild-type E. coli IlvC, wherein IlvC (SEQ ID NO: 13) is encoded by codon optimized E. coli ketol-acid reductoisomerase (KARI) genes Ec_ilvC_coEc (SEQ ID NO: 11) or Ec_ilvC_coSc (SEQ ID NO: 12).

[0020] In one embodiment, the KARI enzyme contains a modification or mutation at the amino acid corresponding to position 71 of the wild-type E. coli IlvC (SEQ ID NO: 13). In another embodiment, the KARI enzyme contains a modification or mutation at the amino acid corresponding to position 76 of the wild-type E. coli IlvC (SEQ ID NO: 13). In yet another embodiment, the KARI enzyme contains a modification or mutation at the amino acid corresponding to position 78 of the wild-type E. coli IlvC (SEQ ID NO: 13). In yet another embodiment, the KARI enzyme contains a modification or mutation at the amino acid corresponding to position 110 of the wild-type E. coli IlvC (SEQ ID NO: 13).

[0021] In one embodiment, the KARI enzyme contains two or more modifications or mutations at the amino acids corresponding to the positions described above. In another embodiment, the KARI enzyme contains three or more modifications or mutations at the amino acids corresponding to the positions described above. In yet another embodiment, the KARI enzyme contains four modifications or mutations at the amino acids corresponding to the positions described above.

[0022] In one specific embodiment, the invention is directed to KARI enzymes wherein the alanine at position 71 is replaced with serine. In another specific embodiment, the invention is directed to KARI enzymes wherein the arginine at position 76 is replaced with aspartic acid. In yet another specific embodiment, the invention is directed to KARI enzymes wherein the serine at position 78 is replaced with aspartic acid. In yet another specific embodiment, the invention is directed to KARI enzymes wherein the glutamine at position 110 is replaced with valine. In yet another specific embodiment, the invention is directed to KARI enzymes wherein the glutamine at position 110 is replaced with alanine. In certain embodiments, the KARI enzyme contains two or more modifications or mutations at the amino acids corresponding to the positions described in these specific embodiments. In certain other embodiments, the KARI enzyme contains three or more modifications or mutations at the amino acids corresponding to the positions described in these specific embodiments. In an exemplary embodiment, the KARI enzyme contains four modifications or mutations at the amino acids corresponding to the positions described in these specific embodiments. In additional embodiments described herein, the KARI may further comprise an amino acid substitution at position 68 of the wild-type E. coli IlvC (SEQ ID NO: 13).

[0023] In one embodiment, the modified or mutated KARI is selected from group consisting of SEQ ID NO: 17, SEQ ID NO: 19, SEQ ID NO: 23, SEQ ID NO: 25, SEQ ID NO: 34, SEQ ID NO: 36, SEQ ID NO: 38, SEQ ID NO: 40, SEQ ID NO: 42 and SEQ ID NO: 44.

[0024] Further included within the scope of the invention are KARI enzymes, other than the E. coli IlvC (SEQ ID NO: 13), which contain alterations corresponding to those set out above. Such KARI enzymes may include, but are not limited to, the KARI enzymes encoded by the S. cerevisiae ILV5 gene, the KARI enzyme encoded by the E. coli ilvC gene and the KARI enzymes from Piromyces sp., Buchnera aphidicola, Spinacia oleracea, Oryza sativa, Chlamydomonas reinhardtii, Neurospora crassa, Schizosaccharomyces pombe, Laccaria bicolor, Ignicoccus hospitalis, Picrophilus torridus, Acidiphilium cryptum, Cyanobacteria/Synechococcus sp., Zymomonas mobilis, Bacteroides thetaiotaomicron, Methanococcus maripaludis, Vibrio fischeri, Shewanella sp, Gramella forsetti, Psychromonas ingrhamaii, and Cytophaga hutchinsonii.

[0025] In certain exemplary embodiments, the KARI to be modified or mutated is a KARI selected from the group consisting of Escherichia coli (GenBank No: NP_{—}418222, SEQ ID NO 13), Saccharomyces cerevisiae (GenBank No: NP_{—}013459, SEQ ID NO: 70), Methanococcus maripaludis (GenBank No: YP_{—}001097443, SEQ ID NO: 71), Bacillus subtilis (GenBank Nos: CAB14789, SEQ ID NO: 72), Piromyces sp (GenBank No: CAA76356, SEQ ID NO: 73), Buchnera aphidicola (GenBank No: AAF13807, SEQ ID NO: 74), Spinacia oleracea (GenBank Nos: Q01292 and CAA40356, SEQ ID NO: 75), Oryza sativa (GenBank No: NP_{—}001056384, SEQ ID NO: 76) Chlamydomonas reinhardtii (GenBank No: XP_{—}001702649, SEQ ID NO: 77), Neurospora crassa (GenBank No: XP_{—}961335, SEQ ID NO: 78), Schizosaccharomyces pombe (GenBank No: NP_{—}001018845, SEQ ID NO: 79), Laccaria bicolor (GenBank No: XP_{—}001880867, SEQ ID NO: 80), Ignicoccus hospitalis (GenBank No: YP_{—}001435197, SEQ ID NO: 81), Picrophilus torridus (GenBank No: YP_{—}023851, SEQ ID NO: 82), Acidiphilium cryptum (GenBank No: YP_{—}001235669, SEQ ID NO: 83), Cyanobacteria/Synechococcus sp. (GenBank No: YP_{—}473733, SEQ ID NO: 84), Zymomonas mobilis (GenBank No: YP_{—}162876, SEQ ID NO: 85), Bacteroides thetaiotaomicron (GenBank No: NP_{—}810987, SEQ ID NO: 86), Vibrio fischeri (GenBank No: YP_{—}205911, SEQ ID NO: 87), Shewanella sp (GenBank No: YP_{—}732498, SEQ ID NO: 88), Gramella forsetti (GenBank No: YP_{—}862142, SEQ ID NO: 89), Psychromonas ingrhamaii (GenBank No: YP_{—}942294, SEQ ID NO: 90), and Cytophaga hutchinsonii (GenBank No: YP_{—}677763, SEQ ID NO: 91).

[0026] In additional aspects, the present application provides modified class II KARI enzymes, wherein said modified class II KARI enzymes are derived from unmodified class II KARI enzymes that have been engineered to comprise an amino acid substitution corresponding to amino acid residue Serine 78 of the E. coli KARI (SEQ ID NO: 13), and wherein said modified class II KARI exhibits an increased ability to use NADH as a cofactor to catalyze the conversion of acetolactate to 2,3-dihydroxyisovalerate as compared to a corresponding unmodified class II KARI. In one embodiment, the amino acid residue corresponding to the Serine 78 of E. coli KARI (SEQ ID NO: 13) is replaced with an amino acid residue selected from the group consisting of aspartic acid and glutamic acid. In further embodiments, the modified class II KARI enzymes may independently or additionally comprise an amino acid substitution corresponding to one or more amino acid residues selected from the group consisting of alanine 71, arginine 76, and glutamine 110 of the E. coli KARI (SEQ ID NO: 13). In some embodiments, the unmodified class II KARI is derived from a genus selected from the group consisting of Escherichia, Shigella, Yersinia, Klebsiella, Vibrio, Providencia, Haemophilus, Shewanella, and Salmonella. In further embodiments, the unmodified class II KARI comprises SEQ ID NO: 13. In yet further embodiments, the unmodified class II KARI comprises an amino acid sequence selected from the group consisting of SEQ ID NOs: 331-676.

[0027] In various embodiments described herein, the modified or mutated KARI may exhibit an increased catalytic efficiency with NADH as compared to the wild-type KARI. In one embodiment, the KARI has at least about a 5% increased catalytic efficiency with NADH as compared to the wild-type KARI. In another embodiment, the KARI has at least about a 25%, at least about a 50%, at least about a 75%, at least about a 100%, at least about a 500%, at least about 1000%, or at least about a 10000% increased catalytic efficiency with NADH as compared to the wild-type KARI.

[0028] In various embodiments described herein, the modified or mutated KARI may exhibit a decreased Michaelis Menten constant (K_{M}) for NADH as compared to the wild-type KARI. In one embodiment, the KARI has at least about a 5% decreased K_{M} for NADH as compared to the wild-type KARI. In another embodiment, the KARI has at least about a 25%, at least about a 50%, at least about a 75%, at least about a 90%, at least about a 95%, or at least about a 97.5% decreased K_{M} for NADH as compared to the wild-type KARI.

[0029] In various embodiments described herein, the modified or mutated KARI may exhibit an increased catalytic constant (k_{cat}) with NADH as compared to the wild-type KARI. In one embodiment, the KARI has at least about a 5% increased k_{cat} with NADH as compared to the wild-type KARI. In another embodiment, the KARI has at least about a 25%, at least about a 50%, at least about a 75%, at least about 100%, at least about 200%, or at least about a 500% increased k_{cat} with NADH as compared to the wild-type KARI.

[0030] In some embodiments described herein, the catalytic efficiency of the modified or mutated KARI with NADH is increased with respect to the catalytic efficiency with NADPH of the wild-type KARI. In one embodiment, the catalytic efficiency of said KARI with NADH is at least about 10% of the catalytic efficiency with NADPH of the wild-type KARI. In another embodiment, the catalytic efficiency of said KARI with NADH is at least about 25%, at least about 50%, or at least about 75% of the catalytic efficiency with NADPH of the wild-type KARI. In some embodiments, the modified or mutated KARI preferentially utilizes NADH rather than NADPH.

[0031] In various embodiments described herein, the modified or mutated KARI may exhibit an increased Michaelis Menten constant (K_{M}) for NADPH as compared to the wild-type KARI. In one embodiment, the KARI has at least about a 5% increased K_{M} for NADPH as compared to the wild-type KARI. In another embodiment, the KARI has at least about a 25%, at least about a 50%, at least about a 100%, at least about a 500%, at least about a 1000%, or at least about a 5000% increased K_{M} for NADPH as compared to the wild-type KARI.

[0032] In various embodiments described herein, the modified or mutated KARI may exhibit an decreased catalytic constant (k_{cat}) with NADPH as compared to the wild-type KARI. In one embodiment, the KARI has at least about a 5% decreased k_{cat} with NADPH as compared to the wild-type KARI. In another embodiment, the KARI has at least about a 25%, at least about a 50%, or at least about a 75%, at least about 90% decreased k_{cat} with NADPH as compared to the wild-type KARI.

[0033] In one embodiment, the application is directed to NADH-dependent KARI enzymes having a catalytic efficiency with NADH that is greater than the catalytic efficiency with NADPH. In one embodiment, the catalytic efficiency of the NADH-dependent KARI is at least about 2-fold greater with NADH than with NADPH. In another embodiment, the catalytic efficiency of the NADH-dependent KARI is at least about 4-fold, at least about 5-fold, at least about 6-fold, at least about 7-fold, at least about 8-fold, at least about 9-fold, at least about 10-fold, at least about 25-fold, at least about 50-fold, at least about 100-fold, or at least about 500-fold greater with NADH than with NADPH.

[0034] In one embodiment, the application is directed to modified or mutated KARI enzymes that demonstrate a switch in cofactor specificity from NADPH to NADH. In one embodiment, the modified or mutated KARI has at least about a 2:1 ratio of catalytic efficiency (k_{cat}/K_{M}) with NADH over k_{cat} with NADPH. In an exemplary embodiment, the modified or mutated KARI has at least about a 10:1 ratio of catalytic efficiency (k_{cat}/K_{M}) with NADH over catalytic efficiency (k_{cat}/K_{M}) with NADPH.

[0035] In some embodiments, the modified or mutated KARI has been modified to be NADH-dependent. In one embodiment, the KARI exhibits at least about a 1:10 ratio of K_{M} for NADH over K_{M} for NADPH.

[0036] In additional embodiments, the invention is directed to modified or mutated KARI enzymes that have been codon optimized for expression in certain desirable host organisms, such as yeast and E. coli. In other aspects, the present invention is directed to recombinant host cells (e.g. recombinant microorganisms) comprising a modified or mutated KARI enzyme of the invention. According to this aspect, the present invention is also directed to methods of using the modified or mutated KARI enzymes in any fermentation process where the conversion of acetolactate to 2,3-dihydroxyisovalerate is desired. In one embodiment according to this aspect, the modified or mutated KARI enzymes may be suitable for enhancing a host cell's ability to produce isobutanol and enable the production of isobutanol under anaerobic conditions. In another embodiment according to this aspect, the modified or mutated KARI enzymes may be suitable for enhancing a host cell's ability to produce 3-methyl-1-butanol.

[0037] According to this aspect, the present invention is also directed to methods of using the modified or mutated KARI enzymes in any fermentation process where the conversion of 2-aceto-2-hydroxy-butyrate to 2,3-dihydroxy-3-methylvalerate is desired. In one embodiment according to this aspect, the modified or mutated KARI enzymes may be suitable for enhancing a host cell's ability to produce 2-methyl-1-butanol and enable the production of 2-methyl-1-butanol under anaerobic conditions.

[0038] In another aspect, there are provided recombinant microorganisms comprising an engineered metabolic pathway for producing one or more C3-C5 alcohols under anaerobic conditions, wherein said engineered metabolic pathway comprises a first dehydrogenase and a second dehydrogenase that catalyze the same reaction, and wherein the first dehydrogenase is NADH-dependent and wherein the second dehydrogenase is NADPH dependent. In an exemplary embodiment, the first dehydrogenase is encoded by the E. coli gene maeA and the second dehydrogenase is encoded by the E. coli gene maeB.

[0039] In another aspect, there are provided recombinant microorganisms comprising an engineered metabolic pathway for producing one or more C3-C5 alcohols under anaerobic conditions, wherein said engineered metabolic pathway comprises a replacement of a gene encoding for pyk or homologs thereof with a gene encoding for ppc or pck or homologs thereof. In another embodiment, the engineered metabolic pathway may further comprise the overexpression of the genes mdh and maeB.

[0040] In various embodiments described herein, the recombinant microorganisms may further be engineered to express an isobutanol producing metabolic pathway comprising at least one exogenous gene that catalyzes a step in the conversion of pyruvate to isobutanol. In one embodiment, the recombinant microorganism may be engineered to express an isobutanol producing metabolic pathway comprising at least two exogenous genes. In another embodiment, the recombinant microorganism may be engineered to express an isobutanol producing metabolic pathway comprising at least three exogenous genes. In another embodiment, the recombinant microorganism may be engineered to express an isobutanol producing metabolic pathway comprising at least four exogenous genes. In another embodiment, the recombinant microorganism may be engineered to express an isobutanol producing metabolic pathway comprising five exogenous genes.

[0041] In various embodiments described herein, the isobutanol pathway enzyme(s) may be selected from the group consisting of acetolactate synthase (ALS), ketol-acid reductoisomerase (KARI), dihydroxyacid dehydratase (DHAD), 2-keto-acid decarboxylase (KIVD), and alcohol dehydrogenase (ADH). In an exemplary embodiment, the ketol-acid reductoisomerase is an NADH-dependent ketol-acid reductoisomerase (an NADH-dependent ketol-acid reductoisomerase may hereinafter be abbreviated as “NKR”).

[0042] In another embodiment, the recombinant microorganism further comprises a pathway for the fermentation of isobutanol from a pentose sugar. In one embodiment, the pentose sugar is xylose. In one embodiment, the recombinant microorganism is engineered to express a functional xylose isomerase (XI). In another embodiment, the recombinant microorganism further comprises a deletion or disruption of a native gene encoding for an enzyme that catalyzes the conversion of xylose to xylitol. In one embodiment, the native gene is xylose reductase (XR). In another embodiment, the native gene is xylitol dehydrogenase (XDH). In yet another embodiment, both native genes are deleted or disrupted. In yet another embodiment, the recombinant microorganism is engineered to express a xylulose kinase enzyme.

[0043] In another embodiment, the recombinant microorganisms of the present invention may further be engineered to include reduced pyruvate decarboxylase (PDC) activity as compared to a parental microorganism. In one embodiment, PDC activity is eliminated. PDC catalyzes the decarboxylation of pyruvate to acetaldehyde, which is reduced to ethanol by alcohol dehydrogenases via the oxidation of NADH to NAD+. In one embodiment, the recombinant microorganism includes a mutation in at least one PDC gene resulting in a reduction of PDC activity of a polypeptide encoded by said gene. In another embodiment, the recombinant microorganism includes a partial deletion of a PDC gene resulting in a reduction of PDC activity of a polypeptide encoded by said gene. In another embodiment, the recombinant microorganism comprises a complete deletion of a PDC gene resulting in a reduction of PDC activity of a polypeptide encoded by said gene. In yet another embodiment, the recombinant microorganism includes a modification of the regulatory region associated with at least one PDC gene resulting in a reduction of PDC activity of a polypeptide encoded by said gene. In yet another embodiment, the recombinant microorganism comprises a modification of the transcriptional regulator resulting in a reduction of PDC gene transcription. In yet another embodiment, the recombinant microorganism comprises mutations in all PDC genes resulting in a reduction of PDC activity of the polypeptides encoded by said genes.

[0044] In another embodiment, the recombinant microorganisms of the present invention may further be engineered to include reduced glycerol-3-phosphate dehydrogenase (GPD) activity as compared to a parental microorganism. In one embodiment, GPD activity is eliminated. GPD catalyzes the reduction of dihydroxyacetone phosphate (DHAP) to glycerol-3-phosphate (G3P) via the oxidation of NADH to NAD⁺. Glycerol is produced from G3P by Glycerol-3-phosphatase (GPP). In one embodiment, the recombinant microorganism includes a mutation in at least one GPD gene resulting in a reduction of GPD activity of a polypeptide encoded by said gene. In another embodiment, the recombinant microorganism includes a partial deletion of a GPD gene resulting in a reduction of GPD activity of a polypeptide encoded by the gene. In another embodiment, the recombinant microorganism comprises a complete deletion of a GPD gene resulting in a reduction of GPD activity of a polypeptide encoded by the gene. In yet another embodiment, the recombinant microorganism includes a modification of the regulatory region associated with at least one GPD gene resulting in a reduction of GPD activity of a polypeptide encoded by said gene. In yet another embodiment, the recombinant microorganism comprises a modification of the transcriptional regulator resulting in a reduction of GPD gene transcription. In yet another embodiment, the recombinant microorganism comprises mutations in all GPD genes resulting in a reduction of GPD activity of a polypeptide encoded by the gene.

[0045] In various embodiments described herein, the recombinant microorganisms of the invention may produce one or more C3-C5 alcohols under anaerobic conditions at a yield which is at least about the same yield as under aerobic conditions. In additional embodiments described herein, the recombinant microorganisms of the invention may produce one or more C3-C5 alcohols at substantially the same rate under anaerobic conditions as the parental microorganism produces under aerobic conditions. In the various embodiments described herein, the engineered metabolic pathway may be balanced with respect to NADH and NADPH as compared to a native or unmodified metabolic pathway from a corresponding parental microorganism, wherein the native or unmodified metabolic pathway is not balanced with respect to NADH and NADPH.

[0046] In another aspect, the present invention provides a method of producing a C3-C5 alcohol, comprising (a) providing a recombinant microorganism comprising an engineered metabolic pathway capable of producing one or more C3-C5 alcohols under aerobic and anaerobic conditions; (b) cultivating the recombinant microorganism in a culture medium containing a feedstock providing the carbon source, until a recoverable quantity of the C3-C5 alcohol is produced; and (c) recovering the C3-C5 alcohol. In one embodiment, the recombinant microorganism is cultured under anaerobic conditions. In a preferred embodiment, the C3-C5 alcohol is produced under anaerobic conditions at a yield which is at least about the same yield as under aerobic conditions.

[0047] In various embodiments described herein, a preferred C3-C5 alcohol is isobutanol. In one embodiment, the microorganism produces isobutanol from a carbon source at a yield of at least about 5 percent theoretical. In another embodiment, the microorganism is selected to produce isobutanol at a yield of at least about 10 percent, at least about 15 percent, about least about 20 percent, at least about 25 percent, at least about 30 percent, at least about 35 percent, at least about 40 percent, at least about 45 percent, at least about 50 percent, at least about 55 percent, at least about 60 percent, at least about 65 percent, at least about 70 percent, at least about 75 percent, at least about 80 percent theoretical, at least about 85 percent theoretical, at least about 90 percent theoretical, or at least about 95 percent theoretical. In one embodiment, the C3-C5 alcohol, such as isobutanol, is produced under anaerobic conditions at about the same yield as under aerobic conditions.

[0048] In another aspect, the present invention provides a recombinant microorganism comprising a metabolic pathway for producing a C3-C5 alcohol from a carbon source, wherein said recombinant microorganism comprises a modification that leads to the regeneration of redox co-factors within said recombinant microorganism. In one embodiment according to this aspect, the modification increases the production of a C3-C5 alcohol under anaerobic conditions as compared to the parental or wild-type microorganism. In a preferred embodiment, the fermentation product is isobutanol. In one embodiment, the re-oxidation or re-reduction of said redox co-factors does not require the pentose phosphate pathway, the TCA cycle, or the generation of additional fermentation products. In another embodiment, the re-oxidation or re-reduction of said redox co-factors does not require the production of byproducts or co-products. In yet another embodiment, additional fermentation products are not required for the regeneration of said redox co-factors.

[0049] In another aspect, the present invention provides a method of producing a C3-C5 alcohol, comprising providing a recombinant microorganism comprising a metabolic pathway for producing a C3-C5 alcohol, wherein said recombinant microorganism comprises a modification that leads to the regeneration of redox co-factors within said recombinant microorganism; cultivating the microorganism in a culture medium containing a feedstock providing the carbon source, until a recoverable quantity of said C3-C5 alcohol is produced; and optionally, recovering the C3-C5 alcohol. In one embodiment, said microorganism is cultivated under anaerobic conditions. In another embodiment, the C3-C5 alcohol is produced under anaerobic conditions at about the same yield as under aerobic conditions. In a preferred embodiment, the C3-C5 alcohol is isobutanol.

[0050] In various embodiments described herein, the recombinant microorganisms may be microorganisms of the Saccharomyces Glade, Saccharomyces sensu stricto microorganisms, Crabtree-negative yeast microorganisms, Crabtree-positive yeast microorganisms, post-WGD (whole genome duplication) yeast microorganisms, pre-WGD (whole genome duplication) yeast microorganisms, and non-fermenting yeast microorganisms.

[0051] In some embodiments, the recombinant microorganisms may be yeast recombinant microorganisms of the Saccharomyces clade.

[0052] In some embodiments, the recombinant microorganisms may be Saccharomyces sensu stricto microorganisms. In one embodiment, the Saccharomyces sensu stricto is selected from the group consisting of S. cerevisiae, S. kudriavzevii, S. mikatae, S. bayanus, S. uvarum. S. carocanis and hybrids thereof.

[0053] In some embodiments, the recombinant microorganisms may be Crabtree-negative recombinant yeast microorganisms. In one embodiment, the Crabtree-negative yeast microorganism is classified into a genera selected from the group consisting of Kluyveromyces, Pichia, Hansenula, or Candida. In additional embodiments, the Crabtree-negative yeast microorganism is selected from Kluyveromyces lactis, Kluyveromyces marxianus, Pichia anomala, Pichia stipitis, Hansenula anomala, Candida utilis, Issatchenkia orientalis and Kluyveromyces waltii.

[0054] In some embodiments, the recombinant microorganisms may be Crabtree-positive recombinant yeast microorganisms. In one embodiment, the Crabtree-positive yeast microorganism is classified into a genera selected from the group consisting of Saccharomyces, Kluyveromyces, Zygosaccharomyces, Debaryomyces, Candida, Pichia and Schizosaccharomyces. In additional embodiments, the Crabtree-positive yeast microorganism is selected from the group consisting of Saccharomyces cerevisiae, Saccharomyces uvarum, Saccharomyces bayanus, Saccharomyces paradoxus, Saccharomyces castelli, Saccharomyces kluyveri, Kluyveromyces thermotolerans, Candida glabrata, Z. bailli, Z. rouxii, Debaryomyces hansenii, Pichia pastorius, Schizosaccharomyces pombe, and Saccharomyces uvarum.

[0055] In some embodiments, the recombinant microorganisms may be post-WGD (whole genome duplication) yeast recombinant microorganisms. In one embodiment, the post-WGD yeast recombinant microorganism is classified into a genera selected from the group consisting of Saccharomyces or Candida. In additional embodiments, the post-WGD yeast is selected from the group consisting of Saccharomyces cerevisiae, Saccharomyces uvarum, Saccharomyces bayanus, Saccharomyces paradoxus, Saccharomyces castelli, and Candida glabrata.

[0056] In some embodiments, the recombinant microorganisms may be pre-WGD (whole genome duplication) yeast recombinant microorganisms. In one embodiment, the pre-WGD yeast recombinant microorganism is classified into a genera selected from the group consisting of Saccharomyces, Kluyveromyces, Candida, Pichia, Debaryomyces, Hansenula, Pachysolen, Issatchenkia, Yarrowia and Schizosaccharomyces. In additional embodiments, the pre-WGD yeast is selected from the group consisting of Saccharomyces kluyveri, Kluyveromyces thermotolerans, Kluyveromyces marxianus, Kluyveromyces waltii, Kluyveromyces lactis, Candida tropicalis, Pichia pastoris, Pichia anomala, Pichia stipitis, Debaryomyces hansenii, Hansenula anomala, Pachysolen tannophilis, Yarrowia lipolytica, Issatchenkia orientalis, and Schizosaccharomyces pombe.

[0057] In some embodiments, the recombinant microorganisms may be microorganisms that are non-fermenting yeast microorganisms, including, but not limited to those, classified into a genera selected from the group consisting of Tricosporon, Rhodotorula, or Myxozyma.

[0058] In certain specific embodiments, there are provided recombinant microorganisms comprising an engineered metabolic pathway for producing one or more C3-C5 alcohols under anaerobic conditions, wherein the recombinant microorganism is selected from GEVO1846, GEVO1886, GEVO1993, GEVO2158, GEVO2302, GEVO1803, GEVO2107, GEVO2710, GEVO2711, GEVO2712, GEVO2799, GEVO2847, GEVO2848, GEVO2849, GEVO2851, GEVO2852, GEVO2854, GEVO2855 and GEVO2856. In another specific embodiment, the present invention provides a plasmid is selected from the group consisting of pGV1698 (SEQ ID NO: 112), pGV1720 (SEQ ID NO: 115), pGV1745 (SEQ ID NO: 117), pGV1655 (SEQ ID NO: 109), pGV1609 (SEQ ID NO: 108), pGV1685 (SEQ ID NO: 111), and pGV1490 (SEQ ID NO: 104).

[0059] In yet another aspect, the present invention provides methods for the conversion of an aldehyde with three to five carbon atoms to the corresponding alcohol is provided. The method includes providing a microorganism comprising a heterologous polynucleotide encoding a polypeptide having NADH-dependent aldehyde reduction activity that is greater than its NADPH-dependent aldehyde reduction activity and having NADH-dependent aldehyde reduction activity that is greater than the endogenous NADPH-dependent aldehyde reduction activity of the microorganism; and contacting the microorganism with the aldehyde.

[0060] In another embodiment, a method for the conversion of an aldehyde derived from the conversion of a 2-ketoacid by a 2-ketoacid decarboxylase is provided. The method includes providing a microorganism comprising a heterologous polynucleotide encoding a polypeptide having NADH-dependent aldehyde reduction activity that is greater than its NADPH-dependent aldehyde reduction activity and having NADH-dependent aldehyde reduction activity that is greater than the endogenous NADPH-dependent aldehyde reduction activity of the microorganism; and contacting the microorganism with the aldehyde. In various embodiments described herein, the aldehyde may be selected from 1-propanal, 1-butanal, isobutyraldehyde, 2-methyl-1-butanal, or 3-methyl-1-butanal. In a preferred embodiment, the aldehyde is isobutyraldehyde.

[0061] In another embodiment, an microorganism include a heterologous polynucleotide encoding a polypeptide having NADH-dependent aldehyde reduction activity that is greater than its NADPH-dependent aldehyde reduction activity and having NADH-dependent aldehyde reduction activity that is greater than the endogenous NADPH-dependent aldehyde reduction activity of the microorganism is provided. The microorganism converts an aldehyde comprising three to five carbon atoms to the corresponding alcohol.

[0062] In another embodiment, an isolated microorganism is provided. The microorganism includes a heterologous polynucleotide encoding a polypeptide having NADH-dependent aldehyde reduction activity that is greater than its NADPH-dependent aldehyde reduction activity and having NADH-dependent aldehyde reduction activity that is greater than the endogenous NADPH-dependent aldehyde reduction activity of the microorganism. The microorganism converts an aldehyde derived from a 2-ketoacid by a 2-ketoacid decarboxylase. In one embodiment, the polypeptide is encoded by the Drosophila melanogaster ADH gene or homologs thereof. In a preferred embodiment, the Drosophila melanogaster ADH gene is set forth in SEQ ID NO: 60. In an alternative embodiment, the Drosophila melanogaster alcohol dehydrogenase is set forth in SEQ ID NO: 61. In another embodiment, the polypeptide possesses 1,2 propanediol dehydrogenase activity and is encoded by a 1,2 propanediol dehydrogenase gene. In a preferred embodiment, the 1,2-propanediol dehydrogenase gene is the Klebsiella pneumoniae dhaT gene as set forth in SEQ ID NO: 62. In an alternative embodiment, the 1,2-propanediol dehydrogenase is set forth in SEQ ID NO: 63. In another embodiment, the polypeptide possesses is encoded by a 1,3-propanediol dehydrogenase gene. In a preferred embodiment, the 1,3-propanediol dehydrogenase gene is the Escherichia coli fucO gene as set forth in SEQ ID NO: 64. In an alternative embodiment, the 1,3-propanediol dehydrogenase is set forth in SEQ ID NO: 65.

[0063] In yet another aspect, the present invention provides a recombinant microorganism producing isobutanol, wherein said recombinant microorganism i) does not overexpress an alcohol dehydrogenase; and ii) produces isobutanol at a higher rate, titer, and productivity as compared to recombinant microorganism expressing the S. cerevisiae alcohol dehydrogenase ADH2.

### BRIEF DESCRIPTION OF THE DRAWINGS

[0064] Illustrative embodiments of the invention are illustrated in the drawings, in which:

[0065] FIG. 1 illustrates an exemplary metabolic pathway for the conversion of glucose to isobutanol via pyruvate.

[0066] FIG. 2 illustrates a metabolic pathway for the conversion of glucose to isobutanol via pyruvate in which a transhydrogenase converts NADH from glycolysis to NADPH

[0067] FIG. 3 illustrates a metabolic pathway for the conversion of glucose to isobutanol via pyruvate in which an NADPH-dependent glyceraldehyde-3-phosphate dehydrogenase converts generates NADPH during glycolysis.

[0068] FIG. 4 illustrates a Transhydrogenase cycle converting NADH to NADPH

[0069] FIG. 5 illustrates an exemplary isobutanol pathway; on the left native conversion of PEP to pyruvate; on the right bypass of pyruvate kinase.

[0070] FIG. 6 illustrates an amino acid sequence alignment among various members of the KARI enzyme family.

[0071] FIG. 7 illustrates the structure alignment of E. coli KARI with rice KARI.

[0072] FIG. 8 illustrates growth of GEVO1859 under anaerobic shift conditions over the course of the fermentation.

[0073] FIG. 9 illustrates isobutanol production of GEVO1859 under anaerobic shift conditions over the course of the fermentation.

[0074] FIG. 10 illustrates that microorganisms featuring an overexpressed E. coli pntAB operon (pGV1745) increased in OD₆₀₀ from 6 h to 24 h by 0.2-1.1 under anaerobic conditions, while microorganisms lacking E. coli pntAB (pGV1720) decreased in OD₆₀₀ by 0.5-1.2.

[0075] FIG. 11 illustrates that microorganisms featuring an overexpressed E. coli pntAB operon (pGV1745) continued isobutanol production under anaerobic conditions until the fermentation was stopped at 48 hours while microorganisms lacking E. coli pntAB (pGV1720) did not produce isobutanol between 24 and 48 hours

[0076] FIG. 12 illustrates that for strains GEVO1886, GEVO1859 and GEVO1846 stable OD values can be observed under anaerobic shift conditions over the course of the fermentation

[0077] FIG. 13 illustrates that over-expression of E. coli pntAB in either strain GEVO1846 or GEVO1886 leads to an improvement in isobutanol production over the course of the fermentation compared to the control strain GEVO1859 which does not over-express E. coli pntAB.

[0078] FIG. 14 illustrates that a strain lacking zwf without E. coli pntAB (Δzwf) grew to an OD of about 3, whereas the samples featuring E. coli pntAB (Δzwf+pntAB) reached OD values of about 5-6.

[0079] FIG. 15 illustrates an SDS PAGE of crude extracts of E. coli BL21(DE3) and GEVO1777 containing overexpressed KARI from plasmids pGV1777 and pET22[ilvC_co], respectively. The arrow highlights the KARI band. The protein marker (M) was an unstained 200 kDa ladder from Fermentas.

[0080] FIG. 16 illustrates an SDS PAGE of crude extract (C), purified KARI over a linear gradient (1), purified KARI over a step gradient (2), and PageRuler™ unstained protein ladder (M, Fermentas). KARI was enriched to high purity with just one purification step.

[0081] FIG. 17 illustrates the structure alignment of E. coli KARI with spinach KARI.

[0082] FIG. 18 illustrates the characterization of E. coli IlvC and three variants resulting from the site saturation libraries: from top to bottom: Specific activities in U/mg, k_{cat} in 1/s, and catalytic efficiencies in M⁻¹*s⁻¹. All proteins were purified over a nickel sepharose histrap column.

[0083] FIG. 19 illustrates the characterization of Ec_IlvC^{B8-his6} and Ec_IlvC^{B8A71S-his6} compared to Ec_IlvC^{his6}, Ec_IlvC^{Q110V-his6}, Ec_IlvC^{Q110A-his6}, and Ec_IlvC^{S78D-his6}.

[0084] FIG. 20 illustrates a protein gel of cell lysates from the production strain GEVO1780 harboring the plasmids pGV1490, or pGV1661.

[0085] FIG. 21 illustrates plasmid pGV1102 (SEQ ID NO: 101).

[0086] FIG. 22 illustrates plasmid pGV1485 (SEQ ID NO: 103).

[0087] FIG. 23 illustrates plasmid pGV1490 (SEQ ID NO: 104).

[0088] FIG. 24 illustrates plasmid pGV1527.

[0089] FIG. 25 illustrates plasmid pGV1572 (SEQ ID NO: 105).

[0090] FIG. 26 illustrates plasmid pGV1573 (SEQ ID NO: 106).

[0091] FIG. 27 illustrates plasmid pGV1575 (SEQ ID NO: 107).

[0092] FIG. 28 illustrates plasmid pGV1609 (SEQ ID NO: 108).

[0093] FIG. 29 illustrates plasmid pGV1631.

[0094] FIG. 30 illustrates plasmid pGV1655 (SEQ ID NO: 109).

[0095] FIG. 31 illustrates plasmid pGV1661 (SEQ ID NO: 110).

[0096] FIG. 32 illustrates plasmid pGV1685 (SEQ ID NO: 111).

[0097] FIG. 33 illustrates plasmid pGV1698 (SEQ ID NO: 112).

[0098] FIG. 34 illustrates plasmid pGV1711 (SEQ ID NO: 113).

[0099] FIG. 35 illustrates plasmids pGV1705-A, pGV1748-A, pGV1749-A, and pGV1778-A carrying the ADH genes Ec_yqhD, Ec_fucO, Dm_ADH, and Kp_dhaT, respectively.

[0100] FIG. 36 illustrates plasmids pGV1748, pGV1749, and pGV1778 carrying the ADH genes Ec_fucO, Dm_ADH, and Kp_dhaT, respectively.

[0101] FIG. 37 illustrates plasmid pGV1716 (SEQ ID NO: 114).

[0102] FIG. 38 illustrates plasmid pGV1720 (SEQ ID NO: 115).

[0103] FIG. 39 illustrates plasmid pGV1730 (SEQ ID NO: 116) and linearization for integration by NruI digest (SEQ ID NO: 116).

[0104] FIG. 40 illustrates plasmid pGV1745 (SEQ ID NO: 117).

[0105] FIG. 41 illustrates plasmid pGV1772.

[0106] FIG. 42 illustrates plasmid pGV1777 (SEQ ID NO: 118).

[0107] FIG. 43 illustrates plasmids pGV1824, pGV1994, pGV2193, pGV2238, and pGV2241 carrying the KARI genes Ec_ilvC_coSc, Ec_ilvC_coSc^{6E6}, Ec_ilvC_coSc^{P2D1-his6}, Ec_ilvC_coSc^{P2D1-A1-his6}, and Ec_ilvC_coSc^{6E6-his6}, respectively.

[0108] FIG. 44 illustrates plasmid pGV1914 (SEQ ID NO: 119).

[0109] FIG. 45 illustrates plasmids pGV1925, pGV1927, pGV1975 and pGV1776 carrying the Ec_fucO in combination with KARI genes Ec_ilvC_coEc, Ec_ilvC_coEc^{S78D}, Ec_ilvC_coEc^{6E6} and Ec_ilvC_coEc^{2H10}, respectively.

[0110] FIG. 46 illustrates plasmid pGV1936 (SEQ ID NO: 120).

[0111] FIG. 47 illustrates plasmid pGV1938.

[0112] FIG. 48 illustrates plasmid pGV2020 (SEQ ID NO: 121).

[0113] FIG. 49 illustrates plasmid pGV2082 (SEQ ID NO: 122).

[0114] FIG. 50 illustrates plasmids pGV2227 (SEQ ID NO: 123), pGV2242 (SEQ ID NO: 125) carrying the KARI genes Ec_ilvC_coScQ110V and Ec_ilvC_coSc^{P2D1}, respectively.

[0115] FIG. 51 illustrates the alignment of available KARI sequences greater than 415 residues in length as depicted in Table 44. The conserved residue corresponding to the Serine 78 of SEQ ID NO: 13 is boxed.

[0116] FIG. 52 illustrates plasmid pGV3195.

### DETAILED DESCRIPTION

### Definitions

[0117] As used herein and in the appended claims, the singular forms “a,” “an,” and “the” include plural referents unless the context clearly dictates otherwise. Thus, for example, reference to “a polynucleotide” includes a plurality of such polynucleotides and reference to “the microorganism” includes reference to one or more microorganisms, and so forth.

[0118] Unless defined otherwise, all technical and scientific terms used herein have the same meaning as commonly understood to one of ordinary skill in the art to which this disclosure belongs. Although methods and materials similar or equivalent to those described herein can be used in the practice of the disclosed methods and compositions, the exemplary methods, devices and materials are described herein.

[0119] Any publications discussed above and throughout the text are provided solely for their disclosure prior to the filing date of the present application. Nothing herein is to be construed as an admission that the inventors are not entitled to antedate such disclosure by virtue of prior disclosure.

[0120] The term “microorganism” includes prokaryotic and eukaryotic microbial species from the Domains Archaea, Bacteria and Eukarya, the latter including yeast and filamentous fungi, protozoa, algae, or higher Protista. The terms “microbial cells” and “microbes” are used interchangeably with the term microorganism.

[0121] The term “prokaryotes” is art recognized and refers to cells which contain no nucleus or other cell organelles. The prokaryotes are generally classified in one of two domains, the Bacteria and the Archaea. The definitive difference between organisms of the Archaea and Bacteria domains is based on fundamental differences in the nucleotide base sequence in the 16S ribosomal RNA.

[0122] The term “Archaea” refers to a categorization of organisms of the division Mendosicutes, typically found in unusual environments and distinguished from the rest of the prokaryotes by several criteria, including the number of ribosomal proteins and the lack of muramic acid in cell walls. On the basis of ssrRNA analysis, the Archaea consist of two phylogenetically-distinct groups: Crenarchaeota and Euryarchaeota. On the basis of their physiology, the Archaea can be organized into three types: methanogens (prokaryotes that produce methane); extreme halophiles (prokaryotes that live at very high concentrations of salt (NaCl); and extreme (hyper) thermophiles (prokaryotes that live at very high temperatures). Besides the unifying archaeal features that distinguish them from Bacteria (i.e., no murein in cell wall, ester-linked membrane lipids, etc.), these prokaryotes exhibit unique structural or biochemical attributes which adapt them to their particular habitats. The Crenarchaeota consist mainly of hyperthermophilic sulfur-dependent prokaryotes and the Euryarchaeota contain the methanogens and extreme halophiles.

[0123] “Bacteria”, or “eubacteria”, refers to a domain of prokaryotic organisms. Bacteria include at least 11 distinct groups as follows: (1) Gram-positive (gram+) bacteria, of which there are two major subdivisions: (1) high G+C group (Actinomycetes, Mycobacteria, Micrococcus, others) (2) low G+C group (Bacillus, Clostridia, Lactobacillus, Staphylococci, Streptococci, Mycoplasmas); (2) Proteobacteria, e.g., Purple photosynthetic+non-photosynthetic Gram-negative bacteria (includes most “common” Gram-negative bacteria); (3) Cyanobacteria, e.g., oxygenic phototrophs; (4) Spirochetes and related species; (5) Planctomyces; (6) Bacteroides, Flavobacteria; (7) Chlamydia; (8) Green sulfur bacteria; (9) Green non-sulfur bacteria (also anaerobic phototrophs); (10) Radioresistant micrococci and relatives; (11) Thermotoga and Thermosipho thermophiles.

[0124] “Gram-negative bacteria” include cocci, nonenteric rods, and enteric rods. The genera of Gram-negative bacteria include, for example, Neisseria, Spirillum, Pasteurella, Brucella, Yersinia, Francisella, Haemophilus, Bordetella, Escherichia, Salmonella, Shigella, Klebsiella, Proteus, Vibrio, Pseudomonas, Bacteroides, Acetobacter, Aerobacter, Agrobacterium, Azotobacter, Spirilla, Serratia, Vibrio, Rhizobium, Chlamydia, Rickettsia, Treponema, and Fusobacterium.

[0125] “Gram positive bacteria” include cocci, nonsporulating rods, and sporulating rods. The genera of gram positive bacteria include, for example, Actinomyces, Bacillus, Clostridium, Corynebacterium, Erysipelothrix, Lactobacillus, Listeria, Mycobacterium, Myxococcus, Nocardia, Staphylococcus, Streptococcus, and Streptomyces.

[0126] The term “genus” is defined as a taxonomic group of related species according to the Taxonomic Outline of Bacteria and Archaea (Garrity, G. M., Lilburn, T. G., Cole, J. R., Harrison, S. H., Euzeby, J., and Tindall, B. J. (2007) The Taxonomic Outline of Bacteria and Archaea. TOBA Release 7.7, March 2007. Michigan State University Board of Trustees.

[0127] The term “species” is defined as a collection of closely related organisms with greater than 97% 16S ribosomal RNA sequence homology and greater than 70% genomic hybridization and sufficiently different from all other organisms so as to be recognized as a distinct unit.

[0128] The terms “modified microorganism,” “recombinant microorganism” and “recombinant host cell” are used by inserting, expressing or overexpressing endogenous polynucleotides, by expressing or overexpressing heterologous polynucleotides, such as those included in a vector, by introducing a mutations into the microorganism or by altering the expression of an endogenous gene. The polynucleotide generally encodes a target enzyme involved in a metabolic pathway for producing a desired metabolite. It is understood that the terms “recombinant microorganism” and “recombinant host cell” refer not only to the particular recombinant microorganism but to the progeny or potential progeny of such a microorganism. Because certain modifications may occur in succeeding generations due to either mutation or environmental influences, such progeny may not, in fact, be identical to the parent cell, but are still included within the scope of the term as used herein.

[0129] The term “wild-type microorganism” describes a cell that occurs in nature, i.e. a cell that has not been genetically modified. A wild-type microorganism can be genetically modified to express or overexpress a first target enzyme. This microorganism can act as a parental microorganism in the generation of a microorganism modified to express or overexpress a second target enzyme. In turn, the microorganism modified to express or overexpress a first and a second target enzyme can be modified to express or overexpress a third target enzyme.

[0130] Accordingly, a “parental microorganism” functions as a reference cell for successive genetic modification events. Each modification event can be accomplished by introducing a nucleic acid molecule into the reference cell. The introduction facilitates the expression or overexpression of a target enzyme. It is understood that the term “facilitates” encompasses the activation of endogenous polynucleotides encoding a target enzyme through genetic modification of e.g., a promoter sequence in a parental microorganism. It is further understood that the term “facilitates” encompasses the introduction of heterologous polynucleotides encoding a target enzyme in to a parental microorganism.

[0131] The term “mutation” as used herein indicates any modification of a nucleic acid and/or polypeptide which results in an altered nucleic acid or polypeptide. Mutations include, for example, point mutations, deletions, or insertions of single or multiple residues in a polynucleotide, which includes alterations arising within a protein-encoding region of a gene as well as alterations in regions outside of a protein-encoding sequence, such as, but not limited to, regulatory or promoter sequences. A genetic alteration may be a mutation of any type. For instance, the mutation may constitute a point mutation, a frame-shift mutation, an insertion, or a deletion of part or all of a gene. In addition, in some embodiments of the modified microorganism, a portion of the microorganism genome has been replaced with a heterologous polynucleotide. In some embodiments, the mutations are naturally-occurring. In other embodiments, the mutations are the results of artificial mutation pressure. In still other embodiments, the mutations in the microorganism genome are the result of genetic engineering.

[0132] The term “biosynthetic pathway”, also referred to as “metabolic pathway”, refers to a set of anabolic or catabolic biochemical reactions for converting one chemical species into another. Gene products belong to the same “metabolic pathway” if they, in parallel or in series, act on the same substrate, produce the same product, or act on or produce a metabolic intermediate (i.e., metabolite) between the same substrate and metabolite end product.

[0133] The term “heterologous” as used herein with reference to molecules and in particular enzymes and polynucleotides, indicates molecules that are expressed in an organism other than the organism from which they originated or are found in nature, independently on the level of expression that can be lower, equal or higher than the level of expression of the molecule in the native microorganism.

[0134] On the other hand, the term “native” or “endogenous” as used herein with reference to molecules, and in particular enzymes and polynucleotides, indicates molecules that are expressed in the organism in which they originated or are found in nature, independently on the level of expression that can be lower equal or higher than the level of expression of the molecule in the native microorganism. It is understood that expression of native enzymes or polynucleotides may be modified in recombinant microorganisms.

[0135] The term “carbon source” generally refers to a substance suitable to be used as a source of carbon for prokaryotic or eukaryotic cell growth. Carbon sources include, but are not limited to, biomass hydrolysates, starch, sucrose, cellulose, hemicellulose, xylose, and lignin, as well as monomeric components of these substrates. Carbon sources can comprise various organic compounds in various forms, including, but not limited to polymers, carbohydrates, acids, alcohols, aldehydes, ketones, amino acids, peptides, etc. These include, for example, various monosaccharides such as glucose, dextrose (D-glucose), maltose, oligosaccharides, polysaccharides, saturated or unsaturated fatty acids, succinate, lactate, acetate, ethanol, etc., or mixtures thereof. Photosynthetic organisms can additionally produce a carbon source as a product of photosynthesis. In some embodiments, carbon sources may be selected from biomass hydrolysates and glucose. The term “substrate” or “suitable substrate” refers to any substance or compound that is converted or meant to be converted into another compound by the action of an enzyme. The term includes not only a single compound, but also combinations of compounds, such as solutions, mixtures and other materials which contain at least one substrate, or derivatives thereof. Further, the term “substrate” encompasses not only compounds that provide a carbon source suitable for use as a starting material, such as any biomass derived sugar, but also intermediate and end product metabolites used in a pathway associated with a modified microorganism as described herein.

[0136] The term “volumetric productivity” or “production rate” is defined as the amount of product formed per volume of medium per unit of time. Volumetric productivity is reported in gram per liter per hour (g/L/h).

[0137] The term “specific productivity” is defined as the rate of formation of the product. To describe productivity as an inherent parameter of the microorganism or microorganism and not of the fermentation process, productivity is herein further defined as the specific productivity in gram product per unit of cells, typically measured spectroscopically as absorbance units at 600 nm (OD₆₀₀ or OD) per hour (g/L/h/OD).

[0138] The term “yield” is defined as the amount of product obtained per unit weight of raw material and may be expressed as g product per g substrate (g/g). Yield may be expressed as a percentage of the theoretical yield. “Theoretical yield” is defined as the maximum amount of product that can be generated per a given amount of substrate as dictated by the stoichiometry of the metabolic pathway used to make the product. For example, the theoretical yield for one typical conversion of glucose to isobutanol is 0.41 g/g. As such, a yield of butanol from glucose of 0.39 g/g would be expressed as 95% of theoretical or 95% theoretical yield.

[0139] The term “titre” or “titer” is defined as the strength of a solution or the concentration of a substance in solution. For example, the titre of a biofuel in a fermentation broth is described as g of biofuel in solution per liter of fermentation broth (g/L).

[0140] The term “total titer” is defined as the sum of all biofuel produced in a process, including but not limited to the biofuel in solution, the biofuel in gas phase, and any biofuel removed from the process and recovered relative to the initial volume in the process or the operating volume in the process.

[0141] A “facultative anaerobic organism” or a “facultative anaerobic microorganism” is defined as an organism that can grow in either the presence or in the absence of oxygen.

[0142] A “strictly anaerobic organism” or a “strictly anaerobic microorganism” is defined as an organism that cannot grow in the presence of oxygen and which does not survive exposure to any concentration of oxygen.

[0143] An “anaerobic organism” or an “anaerobic microorganism” is defined as an organism that cannot grow in the presence of oxygen.

[0144] “Aerobic conditions” are defined as conditions under which the oxygen concentration in the fermentation medium is sufficiently high for an aerobic or facultative anaerobic microorganism to use as a terminal electron acceptor.

[0145] In contrast, “Anaerobic conditions” are defined as conditions under which the oxygen concentration in the fermentation medium is too low for the microorganism to use as a terminal electron acceptor. Anaerobic conditions may be achieved by sparging a fermentation medium with an inert gas such as nitrogen until oxygen is no longer available to the microorganism as a terminal electron acceptor. Alternatively, anaerobic conditions may be achieved by the microorganism consuming the available oxygen of the fermentation until oxygen is unavailable to the microorganism as a terminal electron acceptor. “Anaerobic conditions” are further defined as conditions under which no or small amounts of oxygen are added to the medium at rates of <3 mmol/L/h, preferably <2.5 mmol/L/h, more preferably <2 mmol/L/h and most preferably <1.5 mmol/L/h. “Anaerobic conditions” means in particular completely oxygen-free (=0 mmol/L/h oxygen) or with small amounts of oxygen added to the medium at rates of e.g. <0.5 to <1 mmol/L/h.

[0146] “Dissolved oxygen,” abbreviated as “DO” is expressed throughout as the percentage of saturating concentration of oxygen in water.

[0147] “Aerobic metabolism” refers to a biochemical process in which oxygen is used as a terminal electron acceptor to make energy, typically in the form of ATP, from carbohydrates. Aerobic metabolism occurs e.g. via glycolysis and the TCA cycle, wherein a single glucose molecule is metabolized completely into carbon dioxide in the presence of oxygen.

[0148] In contrast, “anaerobic metabolism” refers to a biochemical process in which oxygen is not the final acceptor of electrons contained in NADH. Anaerobic metabolism can be divided into anaerobic respiration, in which compounds other than oxygen serve as the terminal electron acceptor, and substrate level phosphorylation, in which the electrons from NADH are utilized to generate a reduced product via a “fermentative pathway.”

[0149] In “fermentative pathways,” NAD(P)H donates its electrons to a molecule produced by the same metabolic pathway that produced the electrons carried in NAD(P)H. For example, in one of the fermentative pathways of certain yeast strains, NAD(P)H generated through glycolysis transfers its electrons to pyruvate, yielding lactate. Fermentative pathways are usually active under anaerobic conditions but may also occur under aerobic conditions, under conditions where NADH is not fully oxidized via the respiratory chain. For example, above certain glucose concentrations, crabtree positive yeasts produce large amounts of ethanol under aerobic conditions.

[0150] The term “fermentation product” means any main product plus its coupled product. A “coupled product” is produced as part of the stoichiometric conversion of the carbon source to the main fermentation product. An example for a coupled product is the two molecules of CO₂ that are produced with every molecule of isobutanol during production of isobutanol from glucose according the biosynthetic pathway described herein.

[0151] The term “byproduct” means an undesired product related to the production of a biofuel. Byproducts are generally disposed as waste, adding cost to a biofuel process.

[0152] The term “co-product” means a secondary or incidental product related to the production of biofuel. Co-products have potential commercial value that increases the overall value of biofuel production, and may be the deciding factor as to the viability of a particular biofuel production process.

[0153] The term “non-fermenting yeast” is a yeast species that fails to demonstrate an anaerobic metabolism in which the electrons from NADH are utilized to generate a reduced product via a fermentative pathway such as the production of ethanol and CO₂ from glucose. Non-fermentative yeast can be identified by the “Durham Tube Test” (J. A. Barnett, R. W. Payne, and D. Yarrow. 2000. Yeasts Characteristics and Identification. 3^{rd} edition. p. 28-29. Cambridge University Press, Cambridge, UK.) or by monitoring the production of fermentation productions such as ethanol and CO₂.

[0154] The term “polynucleotide” is used herein interchangeably with the term “nucleic acid” and refers to an organic polymer composed of two or more monomers including nucleotides, nucleosides or analogs thereof, including but not limited to single stranded or double stranded, sense or antisense deoxyribonucleic acid (DNA) of any length and, where appropriate, single stranded or double stranded, sense or antisense ribonucleic acid (RNA) of any length, including siRNA. The term “nucleotide” refers to any of several compounds that consist of a ribose or deoxyribose sugar joined to a purine or a pyrimidine base and to a phosphate group, and that are the basic structural units of nucleic acids. The term “nucleoside” refers to a compound (as guanosine or adenosine) that consists of a purine or pyrimidine base combined with deoxyribose or ribose and is found especially in nucleic acids. The term “nucleotide analog” or “nucleoside analog” refers, respectively, to a nucleotide or nucleoside in which one or more individual atoms have been replaced with a different atom or with a different functional group. Accordingly, the term polynucleotide includes nucleic acids of any length, DNA, RNA, analogs and fragments thereof. A polynucleotide of three or more nucleotides is also called nucleotidic oligomer or oligonucleotide.

[0155] It is understood that the polynucleotides described herein include “genes” and that the nucleic acid molecules described herein include “vectors” or “plasmids.” Accordingly, the term “gene”, also called a “structural gene” refers to a polynucleotide that codes for a particular sequence of amino acids, which comprise all or part of one or more proteins or enzymes, and may include regulatory (non-transcribed) DNA sequences, such as promoter sequences, which determine for example the conditions under which the gene is expressed. The transcribed region of the gene may include untranslated regions, including introns, 5′-untranslated region (UTR), and 3′-UTR, as well as the coding sequence.

[0156] The term “expression” with respect to a gene sequence refers to transcription of the gene and, as appropriate, translation of the resulting mRNA transcript to a protein. Thus, as will be clear from the context, expression of a protein results from transcription and translation of the open reading frame sequence.

[0157] The term “operon” refers two or more genes which are transcribed as a single transcriptional unit from a common promoter. In some embodiments, the genes comprising the operon are contiguous genes. It is understood that transcription of an entire operon can be modified (i.e., increased, decreased, or eliminated) by modifying the common promoter. Alternatively, any gene or combination of genes in an operon can be modified to alter the function or activity of the encoded polypeptide. The modification can result in an increase in the activity of the encoded polypeptide. Further, the modification can impart new activities on the encoded polypeptide. Exemplary new activities include the use of alternative substrates and/or the ability to function in alternative environmental conditions.

[0158] A “vector” is any means by which a nucleic acid can be propagated and/or transferred between organisms, cells, or cellular components. Vectors include viruses, bacteriophage, pro-viruses, plasmids, phagemids, transposons, and artificial chromosomes such as YACs (yeast artificial chromosomes), BACs (bacterial artificial chromosomes), and PLACs (plant artificial chromosomes), and the like, that are “episomes,” that is, that replicate autonomously or can integrate into a chromosome of a host cell. A vector can also be a naked RNA polynucleotide, a naked DNA polynucleotide, a polynucleotide composed of both DNA and RNA within the same strand, a poly-lysine-conjugated DNA or RNA, a peptide-conjugated DNA or RNA, a liposome-conjugated DNA, or the like, that are not episomal in nature, or it can be an organism which comprises one or more of the above polynucleotide constructs such as an agrobacterium or a bacterium.

[0159] “Transformation” refers to the process by which a vector is introduced into a host cell. Transformation (or transduction, or transfection), can be achieved by any one of a number of means including electroporation, microinjection, biolistics (or particle bombardment-mediated delivery), or agrobacterium mediated transformation.

[0160] The term “enzyme” as used herein refers to any substance that catalyzes or promotes one or more chemical or biochemical reactions, which usually includes enzymes totally or partially composed of a polypeptide, but can include enzymes composed of a different molecule including polynucleotides.

[0161] The term “protein” or “polypeptide” as used herein indicates an organic polymer composed of two or more amino acidic monomers and/or analogs thereof. As used herein, the term “amino acid” or “amino acidic monomer” refers to any natural and/or synthetic amino acids including glycine and both D or L optical isomers. The term “amino acid analog” refers to an amino acid in which one or more individual atoms have been replaced, either with a different atom, or with a different functional group. Accordingly, the term polypeptide includes amino acidic polymer of any length including full length proteins, and peptides as well as analogs and fragments thereof. A polypeptide of three or more amino acids is also called a protein oligomer or oligopeptide

[0162] The term “homologs” used with respect to an original enzyme or gene of a first family or species refers to distinct enzymes or genes of a second family or species which are determined by functional, structural or genomic analyses to be an enzyme or gene of the second family or species which corresponds to the original enzyme or gene of the first family or species. Most often, homologs will have functional, structural or genomic similarities. Techniques are known by which homologs of an enzyme or gene can readily be cloned using genetic probes and PCR. Identity of cloned sequences as homolog can be confirmed using functional assays and/or by genomic mapping of the genes.

[0163] A protein has “homology” or is “homologous” to a second protein if the nucleic acid sequence that encodes the protein has a similar sequence to the nucleic acid sequence that encodes the second protein. Alternatively, a protein has homology to a second protein if the two proteins have “similar” amino acid sequences. (Thus, the term “homologous proteins” is defined to mean that the two proteins have similar amino acid sequences).

[0164] The term “analog” or “analogous” refers to nucleic acid or protein sequences or protein structures that are related to one another in function only and are not from common descent or do not share a common ancestral sequence. Analogs may differ in sequence but may share a similar structure, due to convergent evolution. For example, two enzymes are analogs or analogous if the enzymes catalyze the same reaction of conversion of a substrate to a product, are unrelated in sequence, and irrespective of whether the two enzymes are related in structure.

### The Microorganism in General

[0165] Microorganism Characterized by Producing C3-C5 Alcohols from Pyruvate Via an Overexpressed Metabolic Pathway

[0166] Native producers of butanol, and more specifically 1-butaanol, such as Clostridium acetobutylicum, are known, but these organisms generate byproducts such as acetone, ethanol, and butyrate during fermentations. Furthermore, these microorganisms are relatively difficult to manipulate, with significantly fewer tools available than in more commonly used production hosts such as E. coli. Additionally, the physiology and metabolic regulation of these native producers are much less well understood, impeding rapid progress towards high-efficiency production. Furthermore, no native microorganisms have been identified that can metabolize glucose into isobutanol in industrially relevant quantities or yields.

[0167] The production of isobutanol and other fusel alcohols by various yeast species, including Saccharomyces cerevisiae is of special interest to the distillers of alcoholic beverages, for whom fusel alcohols constitute often undesirable off-notes. Production of isobutanol in wild-type yeasts has been documented on various growth media, ranging from grape must from winemaking (Romano, et al., Metabolic diversity of Saccharomyces cerevisiae strains from spontaneously fermented grape musts, 19:311-315, 2003), in which 12-219 mg/L isobutanol were produced, supplemented to minimal media (Oliviera, et al. (2005) World Journal of Microbiology and Biotechnology 21:1569-1576), producing 16-34 mg/L isobutanol. Work from Dickinson, et al. (J Biol. Chem. 272(43):26871-8, 1997) has identified the enzymatic steps utilized in an endogenous S. cerevisiae pathway converting branch-chain amino acids (e.g., valine or leucine) to isobutanol.

[0168] A number of recent publications have described methods for the production of industrial chemicals such as C3-C5 alcohols such as isobutanol using engineered microorganisms. See, e.g., WO/2007/050671 to Donaldson et al., and WO/2008/098227 to Liao et al., which are herein incorporated by reference in their entireties. These publications disclose recombinant microorganisms that utilize a series of heterologously expressed enzymes to convert sugars into isobutanol. However, the production of isobutanol using these microorganisms is feasible only under aerobic conditions and the maximum yield that can be achieved is limited.

[0169] Recombinant microorganisms provided herein can express a plurality of target enzymes involved in pathways for the production isobutanol from a suitable carbon source under anaerobic conditions.

[0170] Accordingly, “engineered” or “modified” microorganisms are produced via the introduction of genetic material into a host or parental microorganism of choice thereby modifying or altering the cellular physiology and biochemistry of the microorganism. Through the introduction of genetic material the parental microorganism acquires new properties, e.g. the ability to produce a new, or greater quantities of, an intracellular metabolite under anaerobic conditions. As described herein, the introduction of genetic material into a parental microorganism results in a new or modified ability to produce isobutanol under anaerobic conditions. The genetic material introduced into the parental microorganism contains gene(s), or parts of genes, coding for one or more of the enzymes involved in a biosynthetic pathway for the production of isobutanol under anaerobic conditions and may also include additional elements for the expression and/or regulation of expression of these genes, e.g. promoter sequences.

[0171] An engineered or modified microorganism can also include in the alternative or in addition to the introduction of a genetic material into a host or parental microorganism, the disruption, deletion or knocking out of a gene or polynucleotide to alter the cellular physiology and biochemistry of the microorganism. Through the reduction, disruption or knocking out of a gene or polynucleotide the microorganism acquires new or improved properties (e.g., the ability to produce a new metabolite or greater quantities of an intracellular metabolite, improve the flux of a metabolite down a desired pathway, and/or reduce the production of undesirable by-products).

[0172] Microorganisms provided herein are modified to produce under anaerobic conditions metabolites in quantities not available in the parental microorganism. A “metabolite” refers to any substance produced by metabolism or a substance necessary for or taking part in a particular metabolic process. A metabolite can be an organic compound that is a starting material (e.g., glucose or pyruvate), an intermediate (e.g., 2-ketoisovalerate), or an end product (e.g., isobutanol) of metabolism. Metabolites can be used to construct more complex molecules, or they can be broken down into simpler ones. Intermediate metabolites may be synthesized from other metabolites, perhaps used to make more complex substances, or broken down into simpler compounds, often with the release of chemical energy.

[0173] Exemplary metabolites include glucose, pyruvate, and C3-C5 alcohols, including isobutanol. The metabolite isobutanol can be produced by a recombinant microorganism engineered to express or over-express metabolic pathway that converts pyruvate to isobutanol. An exemplary metabolic pathway that converts pyruvate to isobutanol may be comprised of a acetohydroxy acid synthase (ALS) enzyme encoded by, for example, alsS from B. subtilis, a ketol-acid reductoisomerase (KARI) encoded by, for example ilvC from E. coli, a dihyroxy-acid dehydratase (DHAD), encoded by, for example ilvD from E. coli, a 2-keto-acid decarboxylase (KIVD) encoded by, for example kivd from L. lactis, and an alcohol dehydrogenase (ADH), encoded by, for example, by a native E. coli alcohol dehydrogenase gene, like Ec_yqhD.

[0174] Accordingly, provided herein are recombinant microorganisms that produce isobutanol and in some aspects may include the elevated expression of target enzymes such as ALS (encoded e.g. by the ilvIH operon from E. coli or by alsS from Bacillus subtilis), KARI (encoded e.g. by ilvC from E. coli), DHAD (encoded, e.g. by ilvD from E. coli, or by ILV3 from S. cerevisiae, and KIVD (encoded, e.g. by, ARO10 from S. cerevisiae, THI3 from S. cerevisiae, kivd from L. lactis).

[0175] The recombinant microorganism may further include the deletion or reduction of the activity of enzymes that (a) directly consume a precursor of the product, e.g. an isobutanol precursor, (b) indirectly consume a precursor of the product, e.g. of isobutanol, or (c) repress the expression or function of a pathway that supplies a precursor of the product, e.g. of isobutanol. These enzymes include pyruvate decarboxylase (encoded, e.g. by PDC1, PDC2, PDC3, PDC5, or PDC6 of S. cerevisiae), glycerol-3-phosphate dehydrogenase (encoded, e.g. by GPD1 or GPD2 of S. cerevisiae) an alcohol dehydrogenase (encoded, e.g., by adhE of E. coli or ADH1, ADH2, ADH3, ADH4, ADH5, ADH6, or ADH7 of S. cerevisiae), lactate dehydrogenase (encoded, e.g., by IdhA of E. coli), fumarate reductase (encoded, e.g., by frdB, frdC or frdBC of E. coli), FNR (encoded, e.g. by fnr of E. coli), 2-isopropylmalate synthase (encoded, e.g. by leuA of E. coli or by LEU4 or LEU9 of S. cerevisiae), valine transaminase (encoded, e.g. by ilvE of E. coli or by BAT1 or BAT2 of S. cerevisiae), pyruvate oxidase (e.g. encoded by poxB of E. coli), Threonine deaminase (encoded, e.g. by ilvA of E. coli or CHA1 or ILV1 of S. cerevisiae), pyruvate-formate-lyase (encoded, e.g. by pflB of E. coli), or phosphate acetyltransferase (encoded, e.g. by pta of E. coli), or any combination thereof, to increase the availability of pyruvate or reduce enzymes that compete for a metabolite in a desired biosynthetic pathway.

[0176] In yeast microorganisms, pyruvate decarboxylase (PDC) is a major competitor for pyruvate. During anaerobic fermentation, the main pathway to oxidize the NADH from glycolysis is through the production of ethanol. Ethanol is produced by alcohol dehydrogenase (ADH) via the reduction of acetaldehyde, which is generated from pyruvate by pyruvate decarboxylase (PDC). Thus, most of the pyruvate produced by glycolysis is consumed by PDC and is not available for the isobutanol pathway. Another pathway for NADH oxidation is through the production of glycerol. Dihydroxyacetone-phosphate, an intermediate of glycolysis is reduced to glycerol 3-phosphate by glycerol 3-phosphate dehydrogenase (GPD). Glycerol 3-phosphatase (GPP) converts glycerol 3-phosphate to glycerol. This pathway consumes carbon from glucose as well as reducing equivalents (NADH) resulting in less pyruvate and reducing equivalents available for the isobutanol pathway. These pathways contribute to low yield and low productivity of C3-C5 alcohols, including isobutanol. Accordingly, deletion or reduction of the activity of PDC and GPD may increase yield and productivity of C3-C5 alcohols, including isobutanol.

[0177] Reduction of PDC activity can be accomplished by 1) mutation or deletion of a positive transcriptional regulator for the structural genes encoding for PDC or 2) mutation or deletion of all PDC genes in a given organism. The term “transcriptional regulator” can specify a protein or nucleic acid that works in trans to increase or to decrease the transcription of a different locus in the genome. For example, in S. cerevisiae, the PDC2 gene, which encodes for a positive transcriptional regulator of PDC1,5,6 genes can be deleted; a S. cerevisiae in which the PDC2 gene is deleted is reported to have only ˜10% of wildtype PDC activity (Hohmann, Mol Gen Genet, 241:657-666 (1993)). Alternatively, for example, all structural genes for PDC (e.g. in S. cerevisiae, PDC1, PDC5, and PDC6, or in K. lactis, PDC1) are deleted.

[0178] Crabtree-positive yeast strains such as Saccharomyces cerevisiae strain that contains disruptions in all three of the PDC alleles no longer produce ethanol by fermentation. However, a downstream product of the reaction catalyzed by PDC, acetyl-CoA, is needed for anabolic production of necessary molecules. Therefore, the Pdc-mutant is unable to grow solely on glucose, and requires a two-carbon carbon source, either ethanol or acetate, to synthesize acetyl-CoA. (Flikweert M T, de Swaaf M, van Dijken J P, Pronk J T. FEMS Microbiol Lett. 1999 May 1; 174(1):73-9. PMID:10234824 and van Maris A J, Geertman J M, Vermeulen A, Groothuizen M K, Winkler A A, Piper M D, van Dijken J P, Pronk J T. Appl Environ Microbiol. 2004 January; 70(1):159-66. PMID: 14711638).

[0179] Thus, in an embodiment, such a Crabtree-positive yeast strain may be evolved to generate variants of the PDC mutant yeast that do not have the requirement for a two-carbon molecule and has a growth rate similar to wild type on glucose. Any method, including chemostat evolution or serial dilution may be utilized to generate variants of strains with deletion of three PDC alleles that can grow on glucose as the sole carbon source at a rate similar to wild type (van Maris et al., Directed Evolution of Pyruvate Decarboxylase-Negative Saccharomyces cerevisiae, Yielding a C2-Independent, Glucose-Tolerant, and Pyruvate-Hyperproducing Yeast, Applied and Environmental Microbiology, 2004, 70(1), 159-166).

[0180] Another byproduct that would decrease yield of isobutanol is glycerol. Glycerol is produced by 1) the reduction of the glycolysis intermediate, dihydroxyacetone phosphate (DHAP), to glycerol-3-phosphate (G3P) via the oxidation of NADH to NAD⁺ by Glycerol-3-phosphate dehydrogenase (GPD) followed by 2) the dephosphorylation of glycerol-3-phophate to glycerol by glycerol-3-phosphatase (GPP). Production of glycerol results in loss of carbons as well as reducing equivalents. Reduction of GPD activity would increase yield of isobutanol. Reduction of GPD activity in addition to PDC activity would further increase yield of isobutanol. Reduction of glycerol production has been reported to increase yield of ethanol production (Nissen et al., Anaerobic and aerobic batch cultivation of Saccharomyces cerevisiae mutants impaired in glycerol synthesis, Yeast, 2000, 16, 463-474; Nevoigt et al., Method of modifying a yeast cell for the production of ethanol, WO 2009/056984). Disruption of this pathway has also been reported to increase yield of lactate in a yeast engineered to produce lactate instead of ethanol (Dundon et al., Yeast cells having disrupted pathway from dihydroxyacetone phosphate to glycerol, US 2009/0053782).

[0181] In one embodiment, the microorganism is a crab-tree positive yeast with reduced or no GPD activity. In another embodiment, the microorganism is a crab-tree positive yeast with reduced or no GPD activity, and expresses an isobutanol biosynthetic pathway and produces isobutanol. In yet another embodiment, the microorganism is a crab-tree positive yeast with reduced or no GPD activity and with reduced or no PDC activity. In another embodiment, the microorganism is a crab-tree positive yeast with reduced or no GPD activity, with reduced or no PDC activity, and expresses an isobutanol biosynthetic pathway and produces isobutanol.

[0182] In another embodiment, the microorganism is a crab-tree negative yeast with reduced or no GPD activity. In another embodiment, the microorganism is a crab-tree negative yeast with reduced or no GPD activity, expresses the isobutanol biosynthetic pathway and produces isobutanol. In yet another embodiment, the microorganism is a crab-tree negative yeast with reduced or no GPD activity and with reduced or no PDC activity. In another embodiment, the microorganism is a crab-tree negative yeast with reduced or no GPD activity, with reduced or no PDC activity, expresses an an isobutanol biosynthetic pathway and produces isobutanol.

[0183] Any method can be used to identify genes that encode for enzymes with pyruvate decarboxylase (PDC) activity. PDC catalyzes the decarboxylation of pyruvate to form acetaldehyde. Generally, homologous or similar PDC genes and/or homologous or similar PDC enzymes can be identified by functional, structural, and/or genetic analysis. In most cases, homologous or similar PDC genes and/or homologous or similar PDC enzymes will have functional, structural, or genetic similarities. Techniques known to those skilled in the art may be suitable to identify homologous genes and homologous enzymes. Generally, analogous genes and/or analogous enzymes can be identified by functional analysis and will have functional similarities. Techniques known to those skilled in the art may be suitable to identify analogous genes and analogous enzymes. For example, to identify homologous or analogous genes, proteins, or enzymes, techniques may include, but not limited to, cloning a PDC gene by PCR using primers based on a published sequence of a gene/enzyme or by degenerate PCR using degenerate primers designed to amplify a conserved region among PDC genes. Further, one skilled in the art can use techniques to identify homologous or analogous genes, proteins, or enzymes with functional homology or similarity. Techniques include examining a cell or cell culture for the catalytic activity of an enzyme through in vitro enzyme assays for said activity, then isolating the enzyme with said activity through purification, determining the protein sequence of the enzyme through techniques such as Edman degradation, design of PCR primers to the likely nucleic acid sequence, amplification of said DNA sequence through PCR, and cloning of said nucleic acid sequence. To identify homologous or similar genes and/or homologous or similar enzymes, analogous genes and/or analogous enzymes or proteins, techniques also include comparison of data concerning a candidate gene or enzyme with databases such as BRENDA, KEGG, or MetaCYC. The candidate gene or enzyme may be identified within the above mentioned databases in accordance with the teachings herein. Furthermore, PDC activity can be determined phenotypically. For example, ethanol production under fermentative conditions can be assessed. A lack of ethanol production may be indicative of a yeast microorganism with no PDC activity.

[0184] Any method can be used to identify genes that encode for enzymes with glycerol-3-phosphate dehydrogenase (GPD) activity. GPD catalyzes the reduction of dihydroxyacetone phosphate (DHAP) to glycerol-3-phosphate (G3P) with the corresponding oxidation of NADH to NAD+. Generally, homologous or similar GPD genes and/or homologous or similar GPD enzymes can be identified by functional, structural, and/or genetic analysis. In most cases, homologous or similar GPD genes and/or homologous or similar GPD enzymes will have functional, structural, or genetic similarities. Techniques known to those skilled in the art may be suitable to identify homologous genes and homologous enzymes. Generally, analogous genes and/or analogous enzymes can be identified by functional analysis and will have functional similarities. Techniques known to those skilled in the art may be suitable to identify analogous genes and analogous enzymes. For example, to identify homologous or analogous genes, proteins, or enzymes, techniques may include, but not limited to, cloning a GPD gene by PCR using primers based on a published sequence of a gene/enzyme or by degenerate PCR using degenerate primers designed to amplify a conserved region among GPD genes. Further, one skilled in the art can use techniques to identify homologous or analogous genes, proteins, or enzymes with functional homology or similarity. Techniques include examining a cell or cell culture for the catalytic activity of an enzyme through in vitro enzyme assays for said activity, then isolating the enzyme with said activity through purification, determining the protein sequence of the enzyme through techniques such as Edman degradation, design of PCR primers to the likely nucleic acid sequence, amplification of said DNA sequence through PCR, and cloning of said nucleic acid sequence. To identify homologous or similar genes and/or homologous or similar enzymes, analogous genes and/or analogous enzymes or proteins, techniques also include comparison of data concerning a candidate gene or enzyme with databases such as BRENDA, KEGG, or MetaCYC. The candidate gene or enzyme may be identified within the above mentioned databases in accordance with the teachings herein. Furthermore, GPD activity can be determined phenotypically. For example, glycerol production under fermentative conditions can be assessed. A lack of glycerol production may be indicative of a yeast microorganism with no GPD activity.

[0185] The recombinant microorganism may further include metabolic pathways for the fermentation of a C3-C5 alcohols from five-carbon (pentose) sugars including xylose. Most yeast species metabolize xylose via a complex route, in which xylose is first reduced to xylitol via a xylose reductase (XR) enzyme. The xylitol is then oxidized to xylulose via a xylitol dehydrogenase (XDH) enzyme. The xylulose is then phosphorylated via an xylulokinase (XK) enzyme. This pathway operates inefficiently in yeast species because it introduces a redox imbalance in the cell. The xylose-to-xylitol step uses NADH as a cofactor, whereas the xylitol-to-xylulose step uses NADPH as a cofactor. Other processes must operate to restore the redox imbalance within the cell. This often means that the organism cannot grow anaerobically on xylose or other pentose sugar. Accordingly, a yeast species that can efficiently ferment xylose and other pentose sugars into a desired fermentation product is therefore very desirable.

[0186] Thus, in one aspect, the recombinant microorganism is engineered to express a functional exogenous xylose isomerase. Exogenous xylose isomerases functional in yeast are known in the art. See, e.g., Rajgarhia et al, US20060234364, which is herein incorporated by reference in its entirety. In an embodiment according to this aspect, the exogenous xylose isomerase gene is operatively linked to promoter and terminator sequences that are functional in the yeast cell. In a preferred embodiment, the recombinant microorganism further has a deletion or disruption of a native gene that encodes for an enzyme (e.g. XR and/or XDH) that catalyzes the conversion of xylose to xylitol. In a further preferred embodiment, the recombinant microorganism also contains a functional, exogenous xylulokinase (XK) gene operatively linked to promoter and terminator sequences that are functional in the yeast cell. In one embodiment, the xylulokinase (XK) gene is overexpressed.

[0187] The disclosure identifies specific genes useful in the methods, compositions and organisms of the disclosure; however it will be recognized that absolute identity to such genes is not necessary. For example, changes in a particular gene or polynucleotide comprising a sequence encoding a polypeptide or enzyme can be performed and screened for activity. Typically such changes comprise conservative mutation and silent mutations. Such modified or mutated polynucleotides and polypeptides can be screened for expression of a functional enzyme using methods known in the art.

[0188] Due to the inherent degeneracy of the genetic code, other polynucleotides which encode substantially the same or a functionally equivalent polypeptide can also be used to clone and express the polynucleotides encoding such enzymes.

[0189] As will be understood by those of skill in the art, it can be advantageous to modify a coding sequence to enhance its expression in a particular host. The genetic code is redundant with 64 possible codons, but most organisms typically use a subset of these codons. The codons that are utilized most often in a species are called optimal codons, and those not utilized very often are classified as rare or low-usage codons. Codons can be substituted to reflect the preferred codon usage of the host, a process sometimes called “codon optimization” or “controlling for species codon bias.”

[0190] Optimized coding sequences containing codons preferred by a particular prokaryotic or eukaryotic host (see also, Murray et al. (1989) Nucl. Acids Res. 17:477-508) can be prepared, for example, to increase the rate of translation or to produce recombinant RNA transcripts having desirable properties, such as a longer half-life, as compared with transcripts produced from a non-optimized sequence. Translation stop codons can also be modified to reflect host preference. For example, typical stop codons for S. cerevisiae and mammals are UAA and UGA, respectively. The typical stop codon for monocotyledonous plants is UGA, whereas insects and E. coli commonly use UAA as the stop codon (Dalphin et al. (1996) Nucl. Acids Res. 24: 216-218). Methodology for optimizing a nucleotide sequence for expression in a plant is provided, for example, in U.S. Pat. No. 6,015,891, and the references cited therein.

[0191] Those of skill in the art will recognize that, due to the degenerate nature of the genetic code, a variety of DNA compounds differing in their nucleotide sequences can be used to encode a given enzyme of the disclosure. The native DNA sequence encoding the biosynthetic enzymes described above are referenced herein merely to illustrate an embodiment of the disclosure, and the disclosure includes DNA compounds of any sequence that encode the amino acid sequences of the polypeptides and proteins of the enzymes utilized in the methods of the disclosure. In similar fashion, a polypeptide can typically tolerate one or more amino acid substitutions, deletions, and insertions in its amino acid sequence without loss or significant loss of a desired activity. The disclosure includes such polypeptides with different amino acid sequences than the specific proteins described herein so long as they modified or variant polypeptides have the enzymatic anabolic or catabolic activity of the reference polypeptide. Furthermore, the amino acid sequences encoded by the DNA sequences shown herein merely illustrate embodiments of the disclosure.

[0192] In addition, homologs of enzymes useful for generating metabolites are encompassed by the microorganisms and methods provided herein.

[0193] As used herein, two proteins (or a region of the proteins) are substantially homologous when the amino acid sequences have at least about 30%, 40%, 50% 60%, 65%, 70%, 75%, 80%, 85%, 90%, 91%, 92%, 93%, 94%, 95%, 96%, 97%, 98%, or 99% identity. To determine the percent identity of two amino acid sequences, or of two nucleic acid sequences, the sequences are aligned for optimal comparison purposes (e.g., gaps can be introduced in one or both of a first and a second amino acid or nucleic acid sequence for optimal alignment and non-homologous sequences can be disregarded for comparison purposes). In one embodiment, the length of a reference sequence aligned for comparison purposes is at least 30%, typically at least 40%, more typically at least 50%, even more typically at least 60%, and even more typically at least 70%, 80%, 90%, 100% of the length of the reference sequence. The amino acid residues or nucleotides at corresponding amino acid positions or nucleotide positions are then compared. When a position in the first sequence is occupied by the same amino acid residue or nucleotide as the corresponding position in the second sequence, then the molecules are identical at that position (as used herein amino acid or nucleic acid “identity” is equivalent to amino acid or nucleic acid “homology”). The percent identity between the two sequences is a function of the number of identical positions shared by the sequences, taking into account the number of gaps, and the length of each gap, which need to be introduced for optimal alignment of the two sequences.

[0194] When “homologous” is used in reference to proteins or peptides, it is recognized that residue positions that are not identical often differ by conservative amino acid substitutions. A “conservative amino acid substitution” is one in which an amino acid residue is substituted by another amino acid residue having a side chain (R group) with similar chemical properties (e.g., charge or hydrophobicity). In general, a conservative amino acid substitution will not substantially change the functional properties of a protein. In cases where two or more amino acid sequences differ from each other by conservative substitutions, the percent sequence identity or degree of homology may be adjusted upwards to correct for the conservative nature of the substitution. Means for making this adjustment are well known to those of skill in the art (see, e.g., Pearson et al., 1994, hereby incorporated herein by reference).

[0195] The following six groups each contain amino acids that are conservative substitutions for one another: 1) Serine (S), Threonine (T); 2) Aspartic Acid (D), Glutamic Acid (E); 3) Asparagine (N), Glutamine (Q); 4) Arginine (R), Lysine (K); 5) Isoleucine (I), Leucine (L), Methionine (M), Alanine (A), Valine (V), and 6) Phenylalanine (F), Tyrosine (Y), Tryptophan (W).

[0196] Sequence homology for polypeptides, which is also referred to as percent sequence identity, is typically measured using sequence analysis software. See, e.g., the Sequence Analysis Software Package of the Genetics Computer Group (GCG), University of Wisconsin Biotechnology Center, 910 University Avenue, Madison, Wis. 53705. Protein analysis software matches similar sequences using measure of homology assigned to various substitutions, deletions and other modifications, including conservative amino acid substitutions. For instance, GCG contains programs such as “Gap” and “Bestfit” which can be used with default parameters to determine sequence homology or sequence identity between closely related polypeptides, such as homologous polypeptides from different species of organisms or between a wild type protein and a mutein thereof. See, e.g., GCG Version 6.1.

[0197] A typical algorithm used comparing a molecule sequence to a database containing a large number of sequences from different organisms is the computer program BLAST (Altschul, S. F., et al. (1990) “Basic local alignment search tool.” J. Mol. Biol. 215:403-410; Gish, W. and States, D. J. (1993) “Identification of protein coding regions by database similarity search.” Nature Genet. 3:266-272; Madden, T. L., et al. (1996) “Applications of network BLAST server” Meth. Enzymol. 266:131-141; Altschul, S. F., et al. (1997) “Gapped BLAST and PSI-BLAST: a new generation of protein database search programs.” Nucleic Acids Res. 25:3389-3402; Zhang, J. and Madden, T. L. (1997) “PowerBLAST: A new network BLAST application for interactive or automated sequence analysis and annotation.” Genome Res. 7:649-656), especially blastp or tblastn (Altschul, S. F., et al. (1997) “Gapped BLAST and PSI-BLAST: a new generation of protein database search programs.” Nucleic Acids Res. 25:3389-3402). Typical parameters for BLASTp are: Expectation value: 10 (default); Filter: seg (default); Cost to open a gap: 11 (default); Cost to extend a gap: 1 (default); Max. alignments: 100 (default); Word size: 11 (default); No. of descriptions: 100 (default); Penalty Matrix: BLOWSUM62.

[0198] When searching a database containing sequences from a large number of different organisms, it is typical to compare amino acid sequences. Database searching using amino acid sequences can be measured by algorithms other than blastp known in the art. For instance, polypeptide sequences can be compared using FASTA, a program in GCG Version 6.1. FASTA provides alignments and percent sequence identity of the regions of the best overlap between the query and search sequences (Pearson, W. R. (1990) “Rapid and Sensitive Sequence Comparison with FASTP and FASTA” Meth. Enzymol. 183:63-98). For example, percent sequence identity between amino acid sequences can be determined using FASTA with its default parameters (a word size of 2 and the PAM250 scoring matrix), as provided in GCG Version 6.1, hereby incorporated herein by reference.

[0199] It is understood that a range of microorganisms can be modified to include recombinant metabolic pathways suitable for the production of C3-C5 alcohols, including isobutanol. In various embodiments, microorganisms may be selected from bacterial or yeast microorganisms. Microorganisms for the production of C3-C5 alcohols, including isobutanol may be selected based on certain characteristics:

[0200] One characteristic may include the ability to metabolize a carbon source in the presence of a C3-C5 alcohol, including isobutanol. A microorganism capable of metabolizing a carbon source at a high isobutanol concentration is more suitable as a production microorganism compared to a microorganism capable of metabolizing a carbon source at a low isobutanol concentration. Another characteristic may include the property that the microorganism is selected to convert various carbon sources into C3-C5 alcohols, including isobutanol. Accordingly, in one embodiment, the recombinant microorganism herein disclosed can convert a variety of carbon sources to products, including but not limited to glucose, galactose, mannose, xylose, arabinose, lactose, sucrose, and mixtures thereof.

[0201] Another characteristic specific to a yeast microorganism may include the property that the microorganism is able to metabolize a carbon source in the absence of pyruvate decarboxylase (PDC). In an embodiment, it is preferable that the yeast microorganism is able to metabolize 5- and 6-carbon sugar in the absence of PDC. In one embodiment, it is even more preferred that a yeast microorganism is able to grow on 5- and 6-carbon sugars in the absence of PDC.

[0202] Another characteristic may include the property that the wild-type or parental microorganism is non-fermenting. In other words, it cannot metabolize a carbon source anaerobically while the yeast is able to metabolize a carbon source in the presence of oxygen. Non-fermenting yeast refers to both naturally occurring yeasts as well as genetically modified yeast. During anaerobic fermentation with fermentative yeast, the main pathway to oxidize the NADH from glycolysis is through the production of ethanol. Ethanol is produced by alcohol dehydrogenase (ADH) via the reduction of acetaldehyde, which is generated from pyruvate by pyruvate decarboxylase (PDC).

[0203] Thus, in one embodiment, a fermentative yeast can be engineered to be non-fermentative by the reduction or elimination of the native PDC activity. Thus, most of the pyruvate produced by glycolysis is not consumed by PDC and is available for the isobutanol pathway. Deletion of this pathway increases the pyruvate and the reducing equivalents available for the isobutanol pathway. Fermentative pathways contribute to low yield and low productivity of isobutanol. Accordingly, deletion of PDC may increase yield and productivity of isobutanol. In one embodiment, the yeast microorganisms may be selected from the “Saccharomyces Yeast Clade”, defined as an ascomycetous yeast taxonomic class by Kurtzman and Robnett in 1998 (“Identification and phylogeny of ascomycetous yeast from analysis of nuclear large subunit (26S) ribosomal DNA partial sequences.” Antonie van Leeuwenhoek 73: 331-371, see FIG. 2 of Leeuwenhook reference). They were able to determine the relatedness of yeast of approximately 500 yeast species by comparing the nucleotide sequence of the D1/D2 domain at the 5′ end of the gene encoding the large ribosomal subunit 26S. In pair-wise comparisons of the D1/D2 nucleotide sequence of S. cerevisiae and the two most distant yeast in the Saccharomyces clade: K. lactis and K. marxianus, yeast from this Glade share greater than 80% identity.

[0204] An ancient whole genome duplication (WGD) event occurred during the evolution of hemiascomycete yeast was discovered using comparative genomics tools (Kellis et al 2004 “Proof and evolutionary analysis of ancient genome duplication in the yeast S. cerevisiae.” Nature 428:617-624. Dujon et al 2004 “Genome evolution in yeasts.” Nature 430:35-44. Langkjaer et al 2003 “Yeast genome duplication was followed by asynchronous differentiation of duplicated genes.” Nature 428:848-852. Wolfe and Shields 1997 “Molecular evidence for an ancient duplication of the entire yeast genome.” Nature 387:708-713.) Using this major evolutionary event, yeast can be divided into species that diverged from a common ancestor following the WGD event (termed “post-WGD yeast” herein) and species that diverged from the yeast lineage prior to the WGD event (termed “pre-WGD yeast” herein).

[0205] Accordingly, in one embodiment, the yeast microorganism may be selected from a post-WGD yeast genus, including but not limited to Saccharomyces and Candida. The favored post-WGD yeast species include: S. cerevisiae, S. uvarum, S. bayanus, S. paradoxus, S. castelli, and C. glabrata.

[0206] In another embodiment, a method provided herein includes a recombinant organism that is a Saccharomyces sensu stricto yeast microorganism. In one aspect, a Saccharomyces sensu stricto yeast microorganism is selected from one of the species: S. cerevisiae, S. cerevisiae, S. kudriavzevii, S. mikatae, S. bayanus, S. uvarum, S. carocanis or hybrids thereof.

[0207] In another embodiment, the yeast microorganism may be selected from a pre-whole genome duplication (pre-WBD) yeast genus including but not limited to Saccharomyces, Kluyveromyces, Issatchenkia, Candida, Pichia, Debaryomyces, Hansenula, Pachysolen, Yarrowia and, Schizosaccharomyces. Representative pre-WGD yeast species include: S. kluyveri, K. thermotolerans, K. marxianus, K. waltii, K. lactis, C. tropicalis, P. pastoris, P. anomala, P. stipitis, D. hansenii, H. anomala, P. tannophilis, I. orientalis, Y. lipolytica, and S. pombe.

[0208] A yeast microorganism may be either Crabtree-negative or Crabtree-positive. A yeast cell having a Crabtree-negative phenotype is any yeast cell that does not exhibit the Crabtree effect. The term “Crabtree-negative” refers to both naturally occurring and genetically modified organisms. Briefly, the Crabtree effect is defined as the inhibition of oxygen consumption by a microorganism when cultured under aerobic conditions due to the presence of a high concentration of glucose (e.g., 50 g-glucose L⁻¹). In other words, a yeast cell having a Crabtree-positive phenotype continues to ferment irrespective of oxygen availability due to the presence of glucose, while a yeast cell having a Crabtree-negative phenotype does not exhibit glucose mediated inhibition of oxygen consumption.

[0209] Accordingly, in one embodiment the yeast microorganism may be selected from a yeast with a Crabtree-negative phenotype including but not limited to the following genera: Kluyveromyces, Pichia, Issatchenkia, Hansenula, and Candida. Crabtree-negative species include but are not limited to: K. lactis, K. marxianus, P. anomala, P. stipitis, H. anomala, I. orientalis, and C. utilis.

[0210] In another embodiment, the yeast microorganism may be selected from a yeast with a Crabtree-positive phenotype, including but not limited to Saccharomyces, Kluyveromyces, Zygosaccharomyces, Debaryomyces, Pichia and Schizosaccharomyces. Crabtree-positive yeast species include but are not limited to: S. cerevisiae, S. uvarum, S. bayanus, S. paradoxus, S. casteffi, S. kluyveri, K. thermotolerans, C. glabrat, Z. bailli, Z. rouxii, D. hansenii, P. pastorius, and S. pombe.

[0211] Bacterial Microorganisms may be selected from a number of genera, including but not limited to Arthrobacter, Bacillus, Brevibacterium, Clostridium, Corynebacterium, Cyanobacterium, Escherichia, Gluconobacter, Lactobacillus, Nocardia, Pseudomonas, Rhodococcus, Saccharomyces, Shewanella, Streptomyces, Xanthomonas, and Zymomonas. In another embodiment, such hosts are Corynebacterium, Cyanobacterium, E. coli or Pseudomonas. In another embodiment, such hosts are E. coli W3110, E. coli B, Pseudomonas oleovorans, Pseudomonas fluorescens, or Pseudomonas putida.

[0212] One exemplary metabolic pathway for the conversion of a carbon source to a C3-C5 alcohol via pyruvate begins with the conversion of glucose to pyruvate via glycolysis. Glycolysis also produces 2 moles of NADH and 2 moles of ATP. Two moles of pyruvate are then used to produce one mole of isobutanol (PCT/US2006/041602, PCT/US2008/053514). Alternative isobutanol pathways have been described in International Patent Application No PCT/US2006/041602 and in Dickinson et al., Journal of Biological Chemistry 273:25751-15756 (1998).

[0213] Accordingly, the engineered isobutanol pathway to convert pyruvate to isobutanol can be, but is not limited to, the following reactions:

1. 2 pyruvate→acetolactate+CO₂
2. acetolactate+NAD(P)H→2,3-dihydroxyisovalerate+NAD(P)⁺
3. 2,3-dihydroxyisovalerate→alpha-ketoisovalerate
4. alpha-ketoisovalerate→isobutyraldehyde+CO₂
5. isobutyraldehyde+NADPH→isobutanol+NADP⁺

[0214] These reactions are carried out by the enzymes 1) Acetolactate Synthase (ALS), 2) Ketol-acid Reducto-Isomerase (KARI), 3) Dihydroxy-acid dehydratase (DHAD), 4) Keto-isovalerate decarboxylase (KIVD), and 5) an Alcohol Dehydrogenase (ADH).

[0215] In another embodiment, the microorganism is engineered to overexpress these enzymes. For example, ALS can be encoded by the alsS gene of B. subtilis, alsS of L. lactis, or the ilvK gene of K. pneumonia. For example, KARI can be encoded by the ilvC genes of E. coli, C. glutamicum, M. maripaludis, or Piromyces sp E2. For example, DHAD can be encoded by the ilvD genes of E. coli, L. lactis, or C. glutamicum, or by the ILV3 gene from S. cerevisiae. KIVD can be encoded by the kivd gene of L. lactis. ADH can be encoded by ADH2, ADH6, or ADH7 of S. cerevisiae, by the adhA gene product of L. lactis, or by an ADH from D. melanogaster.

[0216] The microorganism of the invention may be engineered to have increased ability to convert pyruvate to a C3-C5 alcohol, including isobutanol. In one embodiment, the microorganism may be engineered to have increased ability to convert pyruvate to isobutyraldehyde. In another embodiment, the microorganism may be engineered to have increased ability to convert pyruvate to keto-isovalerate. In another embodiment, the microorganism may be engineered to have increased ability to convert pyruvate to 2,3-dihydroxyisovalerate. In another embodiment, the microorganism may be engineered to have increased ability to convert pyruvate to acetolactate.

[0217] Furthermore, any of the genes encoding the foregoing enzymes (or any others mentioned herein (or any of the regulatory elements that control or modulate expression thereof)) may be optimized by genetic/protein engineering techniques, such as directed evolution or rational mutagenesis.

[0218] It is understood that various microorganisms can act as “sources” for genetic material encoding target enzymes suitable for use in a recombinant microorganism provided herein. For example, In addition, genes encoding these enzymes can be identified from other fungal and bacterial species and can be expressed for the modulation of this pathway. A variety of eukaryotic organisms could serve as sources for these enzymes, including, but not limited to, Drosophila spp., including D. melanogaster, Saccharomyces spp., including S. cerevisiae and S. uvarum, Kluyveromyces spp., including K. thermotolerans, K. lactis, and K. marxianus, Pichia spp., Hansenula spp., including H. polymorpha, Candida spp., Trichosporon spp., Yamadazyma spp., including Y. stipitis, Torulaspora pretoriensis, Schizosaccharomyces spp., including S. pombe, Cryptococcus spp., Aspergillus spp., Neurospora spp., or Ustilago spp. Sources of genes from anaerobic fungi include, but not limited to, Piromyces spp., Orpinomyces spp., or Neocallimastix spp. Sources of prokaryotic enzymes that are useful include, but not limited to, Escherichia. coli, Klebsiella spp., including K. pneumoniae, Zymomonas mobilis, Staphylococcus aureus, Bacillus spp., Clostridium spp., Corynebacterium spp., Pseudomonas spp., Lactococcus spp., Enterobacter spp., and Salmonella spp.

### Methods in General

### Gene Expression

[0219] In another embodiment a method of producing a recombinant microorganism that converts a suitable carbon substrate to C3-C5 alcohols such as isobutanol is provided. The method includes transforming a microorganism with one or more recombinant polynucleotides encoding polypeptides that include but are not limited to, for example, ALS, KARI, DHAD, KIVD, ADH and a transhydrogenase. Polynucleotides that encode enzymes useful for generating metabolites including homologs, variants, fragments, related fusion proteins, or functional equivalents thereof, are used in recombinant nucleic acid molecules that direct the expression of such polypeptides in appropriate host cells, such as bacterial or yeast cells. It is understood that the addition of sequences which do not alter the encoded activity of a polynucleotide, such as the addition of a non-functional or non-coding sequence, is a conservative variation of the basic nucleic acid. The “activity” of an enzyme is a measure of its ability to catalyze a reaction resulting in a metabolite, i.e., to “function”, and may be expressed as the rate at which the metabolite of the reaction is produced. For example, enzyme activity can be represented as the amount of metabolite produced per unit of time or per unit of enzyme (e.g., concentration or weight), or in terms of affinity or dissociation constants.

[0220] Those of skill in the art will recognize that, due to the degenerate nature of the genetic code, a variety of DNA compounds differing in their nucleotide sequences can be used to encode a given amino acid sequence of the disclosure. The native DNA sequence encoding the biosynthetic enzymes described herein are referenced herein merely to illustrate an embodiment of the disclosure, and the disclosure includes DNA compounds of any sequence that encode the amino acid sequences of the polypeptides and proteins of the enzymes utilized in the methods of the disclosure. In similar fashion, a polypeptide can typically tolerate one or more amino acid substitutions, deletions, and insertions in its amino acid sequence without loss or significant loss of a desired activity. The disclosure includes such polypeptides with alternate amino acid sequences, and the amino acid sequences encoded by the DNA sequences shown herein merely illustrate embodiments of the disclosure.

[0221] The disclosure provides nucleic acid molecules in the form of recombinant DNA expression vectors or plasmids, as described in more detail below, that encode one or more target enzymes. Generally, such vectors can either replicate in the cytoplasm of the host microorganism or integrate into the chromosomal DNA of the host microorganism. In either case, the vector can be a stable vector (i.e., the vector remains present over many cell divisions, even if only with selective pressure) or a transient vector (i.e., the vector is gradually lost by host microorganisms with increasing numbers of cell divisions). The disclosure provides DNA molecules in isolated (i.e., not pure, but existing in a preparation in an abundance and/or concentration not found in nature) and purified (i.e., substantially free of contaminating materials or substantially free of materials with which the corresponding DNA would be found in nature) forms.

[0222] Provided herein are methods for the expression of one or more of the genes involved in the production of beneficial metabolites and recombinant DNA expression vectors useful in the method. Thus, included within the scope of the disclosure are recombinant expression vectors that include such nucleic acids. The term expression vector refers to a nucleic acid that can be introduced into a host microorganism or cell-free transcription and translation system. An expression vector can be maintained permanently or transiently in a microorganism, whether as part of the chromosomal or other DNA in the microorganism or in any cellular compartment, such as a replicating vector in the cytoplasm. An expression vector also comprises a promoter that drives expression of an RNA, which typically is translated into a polypeptide in the microorganism or cell extract. For efficient translation of RNA into protein, the expression vector also typically contains a ribosome-binding site sequence positioned upstream of the start codon of the coding sequence of the gene to be expressed. Other elements, such as enhancers, secretion signal sequences, transcription termination sequences, and one or more marker genes by which host microorganisms containing the vector can be identified and/or selected, may also be present in an expression vector. Selectable markers, i.e., genes that confer antibiotic resistance or sensitivity, are used and confer a selectable phenotype on transformed cells when the cells are grown in an appropriate selective medium.

[0223] The various components of an expression vector can vary widely, depending on the intended use of the vector and the host cell(s) in which the vector is intended to replicate or drive expression. Expression vector components suitable for the expression of genes and maintenance of vectors in E. coli, yeast, Streptomyces, and other commonly used cells are widely known and commercially available. For example, suitable promoters for inclusion in the expression vectors of the disclosure include those that function in eukaryotic or prokaryotic host microorganisms. Promoters can comprise regulatory sequences that allow for regulation of expression relative to the growth of the host microorganism or that cause the expression of a gene to be turned on or off in response to a chemical or physical stimulus. For E. coli and certain other bacterial host cells, promoters derived from genes for biosynthetic enzymes, antibiotic-resistance conferring enzymes, and phage proteins can be used and include, for example, the galactose, lactose (lac), maltose, tryptophan (trp), beta-lactamase (bla), bacteriophage lambda PL, and T5 promoters. In addition, synthetic promoters, such as the tac promoter (U.S. Pat. No. 4,551,433), can also be used. For E. coli expression vectors, it is useful to include an E. coli origin of replication, such as from pUC, p1P, p1, and pBR.

[0224] Thus, recombinant expression vectors contain at least one expression system, which, in turn, is composed of at least a portion of PKS and/or other biosynthetic gene coding sequences operably linked to a promoter and optionally termination sequences that operate to effect expression of the coding sequence in compatible host cells. The host cells are modified by transformation with the recombinant DNA expression vectors of the disclosure to contain the expression system sequences either as extrachromosomal elements or integrated into the chromosome.

[0225] Moreover, methods for expressing a polypeptide from a nucleic acid molecule that are specific to yeast microorganisms are well known. For example, nucleic acid constructs that are used for the expression of heterologous polypeptides within Kluyveromyces and Saccharomyces are well known (see, e.g., U.S. Pat. Nos. 4,859,596 and 4,943,529, each of which is incorporated by reference herein in its entirety for Kluyveromyces and, e.g., Gellissen et al., Gene 190(1):87-97 (1997) for Saccharomyces. Yeast plasmids have a selectable marker and an origin of replication, also known as Autonomously Replicating Sequences (ARS). In addition certain plasmids may also contain a centromeric sequence. These centromeric plasmids are generally a single or low copy plasmid. Plasmids without a centromeric sequence and utilizing either a 2 micron (S. cerevisiae) or 1.6 micron (K. lactis) replication origin are high copy plasmids. The selectable marker can be either prototrophic, such as HIS3, TRP1, LEU2, URA3 or ADE2, or antibiotic resistance, such as, bar, ble, hph, or kan.

[0226] A nucleic acid of the disclosure can be amplified using cDNA, mRNA or alternatively, genomic DNA, as a template and appropriate oligonucleotide primers according to standard PCR amplification techniques and those procedures described in the Examples section below. The nucleic acid so amplified can be cloned into an appropriate vector and characterized by DNA sequence analysis. Furthermore, oligonucleotides corresponding to nucleotide sequences can be prepared by standard synthetic techniques, e.g., using an automated DNA synthesizer.

[0227] It is also understood that an isolated nucleic acid molecule encoding a polypeptide homologous to the enzymes described herein can be created by introducing one or more nucleotide substitutions, additions or deletions into the nucleotide sequence encoding the particular polypeptide, such that one or more amino acid substitutions, additions or deletions are introduced into the encoded protein. Mutations can be introduced into the polynucleotide by standard techniques, such as site-directed mutagenesis and PCR-mediated mutagenesis. In contrast to those positions where it may be desirable to make a non-conservative amino acid substitutions (see above), in some positions it is preferable to make conservative amino acid substitutions. A “conservative amino acid substitution” is one in which the amino acid residue is replaced with an amino acid residue having a similar side chain. Families of amino acid residues having similar side chains have been defined in the art. These families include amino acids with basic side chains (e.g., lysine, arginine, histidine), acidic side chains (e.g., aspartic acid, glutamic acid), uncharged polar side chains (e.g., glycine, asparagine, glutamine, serine, threonine, tyrosine, cysteine), nonpolar side chains (e.g., alanine, valine, leucine, isoleucine, proline, phenylalanine, methionine, tryptophan), beta-branched side chains (e.g., threonine, valine, isoleucine) and aromatic side chains (e.g., tyrosine, phenylalanine, tryptophan, histidine).

[0228] Although the effect of an amino acid change varies depending upon factors such as phosphorylation, glycosylation, intra-chain linkages, tertiary structure, and the role of the amino acid in the active site or a possible allosteric site, it is generally preferred that the substituted amino acid is from the same group as the amino acid being replaced. To some extent the following groups contain amino acids which are interchangeable: the basic amino acids lysine, arginine, and histidine; the acidic amino acids aspartic and glutamic acids; the neutral polar amino acids serine, threonine, cysteine, glutamine, asparagine and, to a lesser extent, methionine; the nonpolar aliphatic amino acids glycine, alanine, valine, isoleucine, and leucine (however, because of size, glycine and alanine are more closely related and valine, isoleucine and leucine are more closely related); and the aromatic amino acids phenylalanine, tryptophan, and tyrosine. In addition, although classified in different categories, alanine, glycine, and serine seem to be interchangeable to some extent, and cysteine additionally fits into this group, or may be classified with the polar neutral amino acids.

### Overexpression of Heterologous Genes

[0229] Methods for overexpressing a polypeptide from a native or heterologous nucleic acid molecule are well known. Such methods include, without limitation, constructing a nucleic acid sequence such that a regulatory element promotes the expression of a nucleic acid sequence that encodes the desired polypeptide. Typically, regulatory elements are DNA sequences that regulate the expression of other DNA sequences at the level of transcription. Thus, regulatory elements include, without limitation, promoters, enhancers, and the like. For example, the exogenous genes can be under the control of an inducible promoter or a constitutive promoter. Moreover, methods for expressing a polypeptide from an exogenous nucleic acid molecule in yeast are well known. For example, nucleic acid constructs that are used for the expression of exogenous polypeptides within Kluyveromyces and Saccharomyces are well known (see, e.g., U.S. Pat. Nos. 4,859,596 and 4,943,529, for Kluyveromyces and, e.g., Gellissen et al., Gene 190(1):87-97 (1997) for Saccharomyces). Yeast plasmids have a selectable marker and an origin of replication. In addition certain plasmids may also contain a centromeric sequence. These centromeric plasmids are generally a single or low copy plasmid. Plasmids without a centromeric sequence and utilizing either a 2 micron (S. cerevisiae) or 1.6 micron (K. lactis) replication origin are high copy plasmids. The selectable marker can be either prototrophic, such as HIS3, TRP1, LEU2, URA3 or ADE2, or antibiotic resistance, such as, bar, ble, hph, or kan.

[0230] In another embodiment, heterologous control elements can be used to activate or repress expression of endogenous genes. Additionally, when expression is to be repressed or eliminated, the gene for the relevant enzyme, protein or RNA can be eliminated by known deletion techniques.

[0231] As described herein, any microorganism within the scope of the disclosure can be identified by selection techniques specific to the particular enzyme being expressed, over-expressed or repressed. Methods of identifying the strains with the desired phenotype are well known to those skilled in the art. Such methods include, without limitation, PCR, RT-PCR, and nucleic acid hybridization techniques such as Northern and Southern analysis, altered growth capabilities on a particular substrate or in the presence of a particular substrate, a chemical compound, a selection agent and the like. In some cases, immunohistochemistry and biochemical techniques can be used to determine if a cell contains a particular nucleic acid by detecting the expression of the encoded polypeptide. For example, an antibody having specificity for an encoded enzyme can be used to determine whether or not a particular microorganism contains that encoded enzyme. Further, biochemical techniques can be used to determine if a cell contains a particular nucleic acid molecule encoding an enzymatic polypeptide by detecting a product produced as a result of the expression of the enzymatic polypeptide. For example, transforming a cell with a vector encoding acetolactate synthase and detecting increased cytosolic acetolactate concentrations compared to a cell without the vector indicates that the vector is both present and that the gene product is active. Methods for detecting specific enzymatic activities or the presence of particular products are well known to those skilled in the art. For example, the presence of acetolactate can be determined as described by Hugenholtz and Starrenburg, Appl. Microbiol. Biotechnol. 38:17-22 (1992).

### Identification of Genes in a Host Microorganism

[0232] Any method can be used to identify genes that encode for enzymes with a specific activity. Generally, homologous or analogous genes with similar activity can be identified by functional, structural, and/or genetic analysis. In most cases, homologous or analogous genes with similar activity will have functional, structural, or genetic similarities. Techniques known to those skilled in the art may be suitable to identify homologous genes and homologous enzymes. Generally, analogous genes and/or analogous enzymes can be identified by functional analysis and will have functional similarities. Techniques known to those skilled in the art may be suitable to identify analogous genes and analogous enzymes. For example, to identify homologous or analogous genes, proteins, or enzymes, techniques may include, but not limited to, cloning a gene by PCR using primers based on a published sequence of a gene/enzyme or by degenerate PCR using degenerate primers designed to amplify a conserved region among a gene. Further, one skilled in the art can use techniques to identify homologous or analogous genes, proteins, or enzymes with functional homology or similarity. Techniques include examining a cell or cell culture for the catalytic activity of an enzyme through in vitro enzyme assays for said activity, then isolating the enzyme with said activity through purification, determining the protein sequence of the enzyme through techniques such as Edman degradation, design of PCR primers to the likely nucleic acid sequence, amplification of said DNA sequence through PCR, and cloning of said nucleic acid sequence. To identify homologous or analogous genes with similar activity, techniques also include comparison of data concerning a candidate gene or enzyme with databases such as BRENDA, KEGG, or MetaCYC. The candidate gene or enzyme may be identified within the above mentioned databases in accordance with the teachings herein. Furthermore, enzymatic activity can be determined phenotypically. For example, ethanol production under fermentative conditions can be assessed. A lack of ethanol production may be indicative of a microorganism lacking an alcohol dehydrogenase capable of reducing acetaldehyde to ethanol.

### Genetic Insertions and Deletions

[0233] Any method can be used to introduce a nucleic acid molecule into the chromosomal DNA of a microorganism and many such methods are well known. For example, lithium acetate transformation and electroporation are common methods for introducing nucleic acid into yeast microorganisms. See, e.g., Gietz et al., Nucleic Acids Res. 27:69-74 (1992); Ito et al., J. Bacterol. 153:163-168 (1983); and Becker and Guarente, Methods in Enzymology 194:182-187 (1991).

[0234] In an embodiment, the deletion of a gene of interest in a bacterial microorganism, including an E. coli microorganism occurs according to the principle of homologous recombination. According to this embodiment, an integration cassette containing a module comprising at least one marker gene is flanked on either side by DNA fragments homologous to those of the ends of the targeted integration site. After transforming the host microorganism with the cassette by appropriate methods, homologous recombination between the flanking sequences may result in the marker replacing the chromosomal region in between the two sites of the genome corresponding to flanking sequences of the integration cassette. The homologous recombination event may be facilitated by a recombinase enzyme that may be native to the host microorganism or may be heterologous and transiently overexpressed (Datsenko and Wanner, Proc. Natl. Acad. Sci. USA 97, 6640-6645, 2000).

[0235] In an embodiment, the integration of a gene of interest into a DNA fragment or target gene of a yeast microorganism occurs according to the principle of homologous recombination. According to this embodiment, an integration cassette containing a module comprising at least one yeast marker gene and/or the gene to be integrated (internal module) is flanked on either side by DNA fragments homologous to those of the ends of the targeted integration site (recombinogenic sequences). After transforming the yeast with the cassette by appropriate methods, a homologous recombination between the recombinogenic sequences may result in the internal module replacing the chromosomal region in between the two sites of the genome corresponding to the recombinogenic sequences of the integration cassette. (Orr-Weaver et al., Proc Natl Acad Sci USA 78:6354-6358 (1981))

[0236] In an embodiment, the integration cassette for integration of a gene of interest into a yeast microorganism includes the heterologous gene under the control of an appropriate promoter and terminator together with the selectable marker flanked by recombinogenic sequences for integration of a heterologous gene into the yeast chromosome. In an embodiment, the heterologous gene includes an appropriate native gene desired to increase the copy number of a native gene(s). The selectable marker gene can be any marker gene used in yeast, including but not limited to, HIS3, TRP1, LEU2, URA3, bar, ble, hph, and kan. The recombinogenic sequences can be chosen at will, depending on the desired integration site suitable for the desired application.

[0237] Additionally, in an embodiment pertaining to yeast microorganisms, certain introduced marker genes are removed from the genome using techniques well known to those skilled in the art. For example, URA3 marker loss can be obtained by plating URA3 containing cells in FOA (5-fluoro-orotic acid) containing medium and selecting for FOA resistant colonies (Boeke, J. et al, 1984, Mol. Gen. Genet, 197, 345-47).

[0238] Integration of all the genes of a metabolic pathway that lead to a product into the genome of the production strain eliminates the need of a plasmid expression system, as the enzymes are produced from the chromosome. The integration of pathway genes avoids loss of productivity over time due to plasmid loss. This is important for long fermentation times and for fermentations in large scale where the seed train is long and the production strain has to go through many doublings from the first inoculation to the end of the large scale fermentation.

[0239] Integrated genes are maintained in the strain without selection. This allows the construction of production strains that are free of marker genes which are commonly used for maintenance of plasmids. Production strains with integrated pathway genes can contain minimal amounts of foreign DNA since there are no origins of replication and other non coding DNA necessary that have to be in plasmid based systems. The biocatalyst with integrated pathway genes improves the performance of a production process because it avoids energy and carbon requiring processes. These processes are the replication of many copies of plasmids and the production of non-pathway active proteins like marker proteins in the production strain.

[0240] The expression of pathway genes on multi-copy plasmids can lead to overexpression phenotypes for certain genes. These phenotypes can be growth retardation, inclusion bodies, and cell death. Therefore the expression levels of genes on multi copy plasmids has to be controlled effectively by using inducible expression systems, optimizing the time of induction of said expression system, and optimizing the amount of inducer provided. The time of induction has to be correlated to the growth phase of the biocatalyst, which can be followed by measuring of optical density in the fermentation broth.

[0241] A biocatalyst that has all pathway genes integrated on its chromosome is far more likely to allow constitutive expression since the lower number of gene copies may avoid overexpression phenotypes.

[0242] Plasmids disclosed herein were generally based upon parental plasmids described previously (Lutz, R. & Bujard, H. (1997) Nucleic Acids Research 25(6):1203-1210). Plasmids pGV1698 (SEQ ID NO: 112) and pGV1655 (SEQ ID NO: 109) produce optimized levels of isobutanol pathway enzymes in a production host when compared to other expression systems in the art. Compared to the expression of the isobutanol pathway from pSA55 and pSA69 as described in (WO 2008/098227) BIOFUEL PRODUCTION BY RECOMBINANT MICROORGANISMS, pGV1698 and pGV1655 lead to higher expression of E. coli IlvC and Bacillus subtilis AlsS and lower expression levels for Lactococcus lactis Kivd and E. coli ilvD. These changes are the result of differences in plasmid copy numbers. Also the genes coding for E. coli IlvD and E. coli IlvC were codon optimized for E. coli. This leads to optimized expression of the genes and it also avoids recombination of these genes with their native copies on the E. coli chromosome, thus stabilizing the production strain. The combination of two plasmids with the pSC101 and the ColE1 origin of replication in one cell as realized in a production strain carrying pGV1698 and pGV1655 is known to be more stable than the combination of two plasmids with p15A and ColE1 origins respectively as was used in the prior art (WO 2008/098227—BIOFUEL PRODUCTION BY RECOMBINANT MICROORGANISMS).

### Reduction of Enzymatic Activity

[0243] Host microorganisms within the scope of the invention may have reduced enzymatic activity such as reduced alcohol dehydrogenase activity. The term “reduced” as used herein with respect to a particular enzymatic activity refers to a lower level of enzymatic activity than that measured in a comparable host cell of the same species. Thus, host cells lacking alcohol dehydrogenase activity are considered to have reduced alcohol dehydrogenase activity since most, if not all, comparable host cells of the same species have at least some alcohol dehydrogenase activity. Such reduced enzymatic activities can be the result of lower enzyme expression level, lower specific activity of an enzyme, or a combination thereof. Many different methods can be used to make host cells having reduced enzymatic activity. For example, a host cell can be engineered to have a disrupted enzyme-encoding locus using common mutagenesis or knock-out technology. See, e.g., Methods in Yeast Genetics (1997 edition), Adams, Gottschling, Kaiser, and Stems, Cold Spring Harbor Press (1998), Datsenko and Wanner, Proc. Natl. Acad. Sci. USA 97, 6640-6645, 2000.

[0244] In addition, certain point-mutation(s) can be introduced which results in an enzyme with reduced activity.

[0245] Alternatively, antisense technology can be used to reduce enzymatic activity. For example, host cells can be engineered to contain a cDNA that encodes an antisense molecule that prevents an enzyme from being made. The term “antisense molecule” as used herein encompasses any nucleic acid molecule that contains sequences that correspond to the coding strand of an endogenous polypeptide. An antisense molecule also can have flanking sequences (e.g., regulatory sequences). Thus antisense molecules can be ribozymes or antisense oligonucleotides. A ribozyme can have any general structure including, without limitation, hairpin, hammerhead, or axhead structures, provided the molecule cleaves RNA.

[0246] Host cells having a reduced enzymatic activity can be identified using many methods. For example, host cells having reduced alcohol dehydrogenase activity can be easily identified using common methods, which may include, for example, measuring ethanol formation via gas chromatography.

### Increase of Enzymatic Activity

[0247] Host microorganisms of the invention may be further engineered to have increased activity of enzymes. The term “increased” as used herein with respect to a particular enzymatic activity refers to a higher level of enzymatic activity than that measured in a comparable yeast cell of the same species. For example, overexpression of a specific enzyme can lead to an increased level of activity in the cells for that enzyme. Increased activities for enzymes involved in glycolysis or the isobutanol pathway would result in increased productivity and yield of isobutanol.

[0248] Methods to increase enzymatic activity are known to those skilled in the art. Such techniques may include increasing the expression of the enzyme by increasing plasmid copy number and/or use of a stronger promoter and/or use of activating riboswitches, introduction of mutations to relieve negative regulation of the enzyme, introduction of specific mutations to increase specific activity and/or decrease the K_{M} for the substrate, or by directed evolution. See, e.g., Methods in Molecular Biology (vol. 231), ed. Arnold and Georgiou, Humana Press (2003).

### Microorganism in Detail

### Microorganism Characterized by the Ability to Produce Isobutanol Under Anaerobic Conditions

[0249] Economic studies indicate that the aeration of a fermentation process leads to increased operating and capital expenses and thus makes such a fermentation process less desirable compared to a fermentation process that operates under anaerobic conditions. In addition, yield and aeration conditions are closely related. For example, oxygen used as the terminal electron acceptor in respiration leads to undesired loss of carbon in the form of carbon dioxide, resulting in a reduced yield of the target compound.

[0250] As exemplified in the examples below, the present inventors have overcome the problem of an oxygen requirement for the production of a fermentation product. For example isobutanol was produced anaerobically at rates, titers and yields comparable to those achieved under micro-aerobic conditions.

[0251] Thus, in one embodiment, a modified microorganism may produce said fermentation product under anaerobic conditions, conditions at higher rates, and yields, as compared to a the wild-type or parental microorganism.

[0252] In one embodiment, said modified microorganism may be engineered to balance cofactor usage during the production of said fermentation product under anaerobic conditions.

[0253] In a specific aspect, a modified microorganism in which cofactor usage is balanced during the production of isobutanol may allow the microorganism to produce said isobutanol under anaerobic conditions at higher rates and yields as compared to a modified microorganism in which the cofactor usage in not balanced during production of isobutanol. One compound to be produced by the recombinant microorganism according to the present invention is isobutanol. However, the present invention is not limited to isobutanol. The invention may be applicable to any metabolic pathway that is imbalanced with respect to cofactor usage. One of skill in the art is able identify pathways that are imbalanced with respect to cofactor usage and apply this invention to provide recombinant microorganisms in which the same pathway is balanced with respect to cofactor usage.

[0254] Any method, including the methods described herein may be used to provide a modified microorganism with a metabolic pathway for the production of a target compound in which the cofactor usage is balanced; i.e. said metabolic pathway utilizes the same cofactor that is produced during glycolysis.

[0255] In one embodiment, the microorganism may converts glucose, which can be derived from biomass into a target compound under anaerobic conditions with a yield of greater than 75% of theoretical. In another embodiment, the yield is greater than 80% of theoretical. In another embodiment the yield is greater than 85% of theoretical. In another embodiment, the yield is greater than 90% of theoretical. In another embodiment, the yield is greater than 95% of theoretical. In another embodiment, the yield is greater than 97% of theoretical. In another embodiment the yield is greater than 98% of theoretical. In yet another embodiment, the yield is greater than 99% of theoretical. In still another embodiment, the yield is approximately 100% of theoretical

[0256] In one aspect, the microorganism may convert glucose, which can be derived from biomass into isobutanol under anaerobic conditions with a yield of greater than 50% of theoretical. In one embodiment, the yield is greater than 60% theoretical. In another embodiment, the yield is greater than 70% of theoretical. In yet another embodiment the yield is greater than 80% of theoretical. In yet another embodiment, the yield is greater than 85% of theoretical. In another embodiment, the yield is greater than 90% of theoretical. In yet another embodiment, the yield is greater than 95% of theoretical. In yet another embodiment, the yield is greater than 97% of theoretical. In yet another embodiment the yield is greater than 98% of theoretical. In yet another embodiment, the yield is greater than 99% of theoretical. In still another embodiment, the yield is approximately 100% of theoretical.

[0257] It is understood that while in the present disclosure the yield is exemplified for glucose as a carbon source, the invention can be applied to other carbon sources and the yield may vary depending on the carbon source used. One skilled in the art can calculate yields on various carbon sources. Other carbon sources, such as including but not limited to galactose, mannose, xylose, arabinose, sucrose, lactose, may be used. Further, oligomers or polymers of these and other sugars may be used as a carbon source.

### Microorganism Characterized by an Increased Product Yield

[0258] Economic studies indicate that the predominant factor accounting for the production cost for commodity chemicals and fuels from fermentation processes is attributed to the feedstock cost. In fact, as much as 60% of the variable cash operating costs or more may be attributable to feedstock costs. An important measure of the process economics is therefore the product yield. For a biocatalyst to produce a biofuel most economically, a single product is desired. Extra products reduce primary product yield increasing capital and operating costs, particularly if those extra, undesired products, or byproducts have little or no value. Extra products or byproducts also require additional capital and operating costs to separate these products from the product or biofuel of interest or may require additional cost for disposal.

[0259] As exemplified in the examples below, the present inventors have shown that, achieving cofactor balance increases the yield of fermentation products as compared to wild-type or parental organisms.

[0260] In an embodiment, a microorganism is provided in which cofactor usage is balanced during the production of a fermentation product and the microorganism produces the fermentation product at a higher yield compared to a modified microorganism in which the cofactor usage in not balanced.

[0261] In a specific aspect of the present invention, a microorganism is provided in which cofactor usage is balanced during the production of isobutanol and the microorganism produces isobutanol at a higher yield compared to a modified microorganism in which the cofactor usage in not balanced.

[0262] One compound to be produced by the recombinant microorganism according to the present invention is isobutanol. However, the present invention is not limited to isobutanol. The invention may be applicable to any microorganism comprising a metabolic pathway that leads to an imbalance with respect to cofactor usage. One of skill in the art is able to identify microorganisms comprising metabolic pathways that lead to an imbalance with respect to cofactor usage and apply this invention to provide recombinant microorganisms in which the microorganism comprising the same metabolic pathway is balanced with respect to cofactor usage.

[0263] Any method, including the methods described herein may be used to provide a modified microorganism with a metabolic pathway for the production of a target compound in which the cofactor usage is balanced; i.e. said metabolic pathway utilizes the same cofactor that is produced during glycolysis.

[0264] In one embodiment, the microorganism may convert glucose, which can be derived from biomass into a target compound with a yield of greater than 75% of theoretical. In another embodiment, the yield is greater than 80% of theoretical. In another embodiment the yield is greater than 85% of theoretical. In another embodiment, the yield is greater than 90% of theoretical. In another embodiment, the yield is greater than 95% of theoretical. In another embodiment, the yield is greater than 97% of theoretical. In another embodiment the yield is greater than 98% of theoretical. In yet another embodiment, the yield is greater than 99% of theoretical. In still another embodiment, the yield is approximately 100% of theoretical

[0265] In one aspect, the microorganism may convert glucose, which can be derived from biomass into isobutanol with a yield of greater than 75% of theoretical. In one embodiment, the yield is greater than 80% of theoretical. In one embodiment the yield is greater than 85% of theoretical. In another embodiment, the yield is greater than 90% of theoretical. In yet another embodiment, the yield is greater than 95% of theoretical. In yet another embodiment, the yield is greater than 97% of theoretical. In yet another embodiment the yield is greater than 98% of theoretical. In yet another embodiment, the yield is greater than 99% of theoretical. In still another embodiment, the yield is approximately 100% of theoretical.

[0266] It is understood that while in the present disclosure the yield is exemplified for glucose as a carbon source, the invention can be applied to other carbon sources and the yield may vary depending on the carbon source used. One skilled in the art can calculate yields on various carbon sources. Other carbon sources, such as including but not limited to galactose, mannose, xylose, arabinose, sucrose, lactose, may be used. Further, oligomers or polymers of these and other sugars may be used as a carbon source.

### Microorganism Characterized by Balancing Cofactor Usage

[0267] The ideal production microorganism produces a desirable product at close to theoretical yield. For example the ideal isobutanol producing organism produces isobutanol according to the following equation:

[0268] 1 glucose→isobutanol+2 CO₂+H₂O

[0269] Accordingly, 66% of the glucose carbon results in isobutanol, while 33% is lost as CO₂. In exemplary metabolic pathways for the conversion of pyruvate to isobutanol described by Atsumi et al. (Atsumi et al., Nature, 2008 Jan. 3; 451(7174):86-9, which is herein incorporated by reference; International Patent Application No PCT/US2008/053514, which is herein incorporated by reference) two of the five enzymes used to convert pyruvate into isobutanol according to the metabolic pathway outlined in FIG. 1 require the reduced cofactor nicotinamide adenine dinucleotide phosphate (NADPH). NADPH is produced only sparingly by the cell—the reduced cofactor nicotinamide adenine dinucleotide (NADH) is the preferred equivalent. Respiration is required to produce NADPH in the large quantities required to support high-level production of isobutanol.

[0270] Even If competing pathways can be eliminated or reduced in activity by metabolic engineering, yield is limited to about 83% of theoretical. Carbon loss to carbon dioxide (CO₂) remains the main limitation on yield in the aforementioned metabolic pathway for the production of isobutanol. Reducing the oxygen uptake rate (OUR) of the cells should decrease the loss of carbon to CO₂ because it decreases the metabolic flux through the CO₂-generating tricarboxylic acid (TCA) cycle and/or pentose phosphate pathway (PPP). However, a modified microorganism utilizing the aforementioned metabolic pathway for the production of isobutanol exhibits drastically decreased specific productivity under conditions where the OUR is decreased and isobutanol production under anaerobic conditions may not be possible.

[0271] The decreased yield and the loss of productivity upon O₂ limitation indicate that the strain uses one or more metabolic pathways to generate the NADPH needed to support isobutanol production. In a modified cell utilizing the aforementioned metabolic pathway the production of isobutanol from glucose results in an imbalance between the cofactors reduced during glycolysis and the cofactors oxidized during the conversion of pyruvate to isobutanol. While glycolysis produces two moles of NADH, the isobutanol pathway consumes two moles of NADPH. This leads to a deficit of two moles of NADPH and overproduction of two moles of NADH per isobutanol molecule produced, a state described henceforth as cofactor imbalance.

[0272] The terms “cofactor balance” or “balanced with respect to cofactor usage” refer to a recombinant microorganism comprising a metabolic pathway converting a carbon source to a fermentation product and a modification that leads to the regeneration of all redox cofactors within the recombinant microorganism producing said fermentation product from a carbon source and wherein the re-oxidation or re-reduction of said redox cofactors does not require the pentose phosphate pathway, the TCA cycle or the generation of additional fermentation products.

[0273] Stated another way, the terms “cofactor balance” or “balanced with respect to cofactor usage” can refer to an advantageous modification that leads to the regeneration of all redox cofactors within the recombinant microorganism producing a fermentation product from a carbon source and wherein said re-oxidation or re-reduction of all redox cofactors does not require the production of byproducts or co-products.

[0274] Stated another way, the terms “cofactor balance” or “balanced with respect to cofactor usage” can refer to an advantageous modification that leads to the regeneration of all redox cofactors within the recombinant microorganism producing a fermentation product from a carbon source under anaerobic conditions and wherein the production of additional fermentation products is not required for re-oxidation or re-reduction of redox cofactors.

[0275] Stated another way, the terms “cofactor balance” or “balanced with respect to cofactor usage” can refer to an advantageous modification that leads to the regeneration of all redox cofactors within the recombinant microorganism producing a fermentation product from a carbon source and wherein said modification increases production of said fermentation product under anaerobic conditions compared to the parental or wild type microorganism and wherein additional fermentation products are not required for the regeneration of said redox cofactors.

[0276] The cell has several options for resolving a cofactor imbalance. One is to change the relative fluxes going from glucose through glycolysis and through the pentose phosphate pathway (PPP). For each glucose molecule metabolized through the PPP, two moles of NADPH are generated in addition to the two moles of NADH that are generated through glycolysis (a total of 4 reducing equivalents). Therefore, use of the PPP results in the generation of excess reducing equivalents since only two moles are consumed during the production of isobutanol. Under anaerobic conditions, and without an alternate electron acceptor, the cell has no way to reoxidize or regenerate these extra cofactors to NADP⁺ and metabolism thus stops. The excess reducing equivalents must instead be utilized for energy production through aerobic respiration which is only possible under aerobic conditions or for the production of byproducts. Another result of the flux through the PPP is that one additional molecule of CO₂ is lost per molecule of glucose consumed, which limits the yield of isobutanol that can be achieved under aerobic conditions.

[0277] Another way the cell can generate NADPH is via the TCA cycle. Flux through the TCA cycle results in carbon loss through CO₂ and in production of NADH in addition to the NADPH required for the isobutanol pathway. The NADH would have to be utilized for energy production through respiration under aerobic conditions (and without an alternate electron acceptor) or for the production of byproducts. In addition, the TCA cycle likely is not functional under anaerobic conditions and is therefore unsuitable for the production of stoichiometric amounts of NADPH in an anaerobic isobutanol process.

[0278] An economically competitive isobutanol process requires a high yield from a carbon source. Lower yield means that more feedstock is required to produce the same amount of isobutanol. Feedstock cost is the major component of the overall operating cost, regardless of the nature of the feedstock and its current market price. From an economical perspective, this is important because the cost of isobutanol is dependent on the cost of the biomass-derived sugars. An increase in feedstock cost results in an increase in isobutanol cost. Thus, it is desirable to utilize NADH-dependent enzymes for the conversion of pyruvate to isobutanol.

[0279] An enzyme is “NADH-dependent” if it catalyzes the reduction of a substrate coupled to the oxidation of NADH with a catalytic efficiency that is greater than the reduction of the same substrate coupled to the oxidation of NADPH at equal substrate and cofactor concentrations.

[0280] Thus, in one embodiment of the invention, a microorganism is provided in which cofactor usage is balanced during the production of a fermentation product.

[0281] In a specific aspect, a microorganism is provided in which cofactor usage is balanced during the production of isobutanol, in this case, production of isobutanol from pyruvate utilizes the same cofactor that is produced during glycolysis.

[0282] In another embodiment, a microorganism is provided in which cofactor usage is balanced during the production of a fermentation product and the microorganism produces the fermentation product at a higher yield compared to a modified microorganism in which the cofactor usage in not balanced.

[0283] In a specific aspect, a microorganism is provided in which cofactor usage is balanced during the production of isobutanol and the microorganism produces isobutanol at a higher yield compared to a modified microorganism in which the cofactor usage in not balanced.

[0284] In yet another embodiment, a modified microorganism in which cofactor usage is balanced during the production of a fermentation product may allow the microorganism to produce said fermentation product under anaerobic conditions at higher rates, and yields as compared to a modified microorganism in which the cofactor usage in not balanced during production of a fermentation product.

[0285] In a specific aspect, a modified microorganism in which cofactor usage is balanced during the production of isobutanol may allow the microorganism to produce isobutanol under anaerobic conditions at higher rates, and yields as compared to a modified microorganism in which the cofactor usage is not balanced during production of isobutanol.

[0286] One compound to be produced by the recombinant microorganism according to the present invention is isobutanol. However, the present invention is not limited to isobutanol. The invention may be applicable to any metabolic pathway that is imbalanced with respect to cofactor usage. One skilled in the art is able to identify pathways that are imbalanced with respect to cofactor usage and apply this invention to provide recombinant microorganisms in which the same pathway is balanced with respect to cofactor usage. One skilled in the art will recognize that the identified pathways may be of longer or shorter length, contain more or fewer genes or proteins, and require more or fewer cofactors than the exemplary isobutanol pathway. Further, one skilled in the art will recognize that in certain embodiments, such as a recombinant microbial host that produces an excess of NADPH, certain embodiments of the present invention may be adapted to convert NADPH to NADH.

### Microorganism Characterized by Providing Cofactor Balance Via Overexpression of a Transhydrogenase

[0287] Conversion of glucose to pyruvate via glycolysis in E. coli leads to the production of two moles of NADH. A metabolic pathway that converts pyruvate to a target product that consumes either two moles of NADPH or one mole of NADH and one mole of NADPH leads to cofactor imbalance. For example, the isobutanol metabolic pathway that converts glucose to two moles of pyruvate via glycolysis to 1 mole of isobutanol generates two moles of NADH and consumes two moles of NADPH and thus is imbalanced with respect to cofactor usage.

[0288] The different ways in which the cell can provide NADPH to the isobutanol pathway show that utilization of the TCA cycle as well as the PPP has to be avoided to maximize the yield of the isobutanol process. Loss of CO₂ as a byproduct in isobutanol producing microorganism described in the prior art (Atsumi et al., Nature, 2008 Jan. 3; 451(7174):86-9; International Patent Application No PCT/US2008/053514; International Patent Application No PCT/US2006/041602) indicates that either or both of these two yield-limiting pathways are currently active.

[0289] A Nicotinamide dinucleotide transhydrogenase (hereinafter may be referred to simply as “transhydrogenase”) that catalyzes the interconversion of NADH and NADPH as disclosed herein may be used to provide cofactor balance in a metabolic pathway for the production of a target compound that is otherwise imbalanced with respect to cofactor usage and thus decrease the yield loss to CO₂ in such a pathway (FIG. 2)

[0290] A preferred transhydrogenase under conditions in which the reduced cofactor NADPH is limiting is one that preferentially catalyzes the conversion of NADH to NADPH. For example, membrane-bound transhydrogenases have been described in bacteria that catalyze this reaction. Membrane bound transhydrogenases require energy in form of proton translocation to catalyze the reaction. As long as there is enough energy available to maintain the proton gradient across the cell membrane a transhydrogenase may thus be used to balance an otherwise imbalanced metabolic pathway. However, in some circumstances, a transhydrogenase that catalyzes the conversion of NADPH to NADH may be preferred. However, a preferred transhydrogenase under conditions in which the reduced cofactor NADH is limiting is one that preferentially catalyzes the conversion of NADPH to NADH.

[0291] The expression and specific activity of an endogenously expressed membrane-bound transhydrogenase might not be sufficient to maintain the high metabolic flux through the metabolic pathway for the production of a fermentation product (e.g. for isobutanol) that is required in a commercial process.

[0292] Thus, in one embodiment, the insufficient activity of the membrane-bound transhydrogenase may be compensated by overexpression of the coding genes of a membrane bound transhydrogenase.

[0293] In a preferred embodiment, the E. coli pntA (SEQ ID NO: 1) and pntB genes (SEQ ID NO: 3), encoding for the PntA (SEQ ID NO: 2) and PntB (SEQ ID NO: 4) enzymes respectively or homologs thereof may be overexpressed. These genes have been overexpressed in E. coli before for characterization of the enzyme (Clarke, D. M. and P. D. Bragg, Journal of Bacteriology, 1985. 162(1): p. 367-373) and have been used to regenerate NADPH cofactor in the production of chiral alcohols from ketones using a whole cell biocatalyst (Weckbecker, A. and W. Hummel, Biotechnology Letters, 2004. 26(22): p. 1739-1744.) or to increase production of biosynthesized products that rely on NADPH-dependent biosynthetic pathways (U.S. Pat. No. 5,830,716).

[0294] In one embodiment, the E. coli pntAB operon (SEQ ID NO: 1 and SEQ ID NO: 3) is expressed in the presence of the isobutanol pathway. The E. coli pntAB operon may be cloned on a medium copy plasmid (p15A origin of replication) under the control of the LtetOI promoter, for example pGV1685 (SEQ ID NO: 111). The high level expression of membrane proteins can lead to the buildup of toxic intermediates and to inclusion bodies. Thus, in another embodiment, different copy numbers of the E. coli pntAB operons may be tested to find the optimum expression level of this membrane transhydrogenase.

[0295] In another embodiment, the E. coli pntAB operon may be integrated into the chromosome of the microorganism. For example, E. coli pntAB may be integrated into the E. coli genome.

[0296] In one aspect of the present invention, the pntAB operon may be integrated into the sthA locus of E. coli or the corresponding locus in another microorganism. The sthA gene codes for the soluble transhydrogenase of E. coli and has previously been shown to be utilized by the cell for the conversion of NADPH to NADH. To avoid the generation of a futile cycle E. coli pntAB may be integrated at the sthA site, thus removing the sthA gene and eliminating this reverse reaction.

[0297] The E. coli pntAB operon may be integrated into a wild-type E. coli W3110 and then transduced into a recombinant microorganism that produces a product via a metabolic pathway that is imbalanced with respect to cofactor usage. For example, the E. coli pntAB operon may be integrated into an isobutanol producing strain in which the isobutanol pathway is integrated into the chromosome.

[0298] For example the E. coli pntAB operon may be integrated into the isobutanol pathway strain GEVO1859 which has the pathway genes Bs_alsS1 and Ec_ilvC_coEc integrated into the pflB site and has Ll_kivd1 and Ec_ilvD_coEc genes integrated into the adhE site. All genes may be under the control of the LlacOI promoter.

[0299] The soluble E. coli transhydrogenase coded by sthA has been shown to be utilized by the cell for the conversion of NADPH to NADH. However overexpression of sthA was demonstrated to increase the yield of poly(3-hydroxybutyrate) production in E. coli. These results indicate that if a pathway is present in E. coli that consumes NADPH effectively, the soluble transhydrogenase can function in the direction of NADPH production. The advantages of using SthA as opposed to E. coli PntAB are that the soluble protein might be easier to overexpress and that this enzyme is energy independent. The sthA gene may be cloned into pGV1685, replacing E. coli pntAB. Decisive for the success of this approach is the affinity of E. coli IlvC (KARI enzyme) for its cofactor and the steady state concentrations of NADH and NADPH in the cell that allow SthA to run “backwards” or in the direction of converting NADH to NADPH. It is to be expected that the concentration of the reduced cofactor NADPH has to be low in order for SthA to supply this cofactor. If this concentration is low enough to limit the activity of E. coli IlvC and therefore the flux through the isobutanol pathway then this approach is not suitable for the isobutanol production strain without further modifications. These modifications could be identification of a KARI with a lower K_{M} for NADPH, or mutagenesis and directed evolution to increase the affinity of E. coli IlvC for its cofactor.

[0300] This approach may be used to provide cofactor balance in a metabolic pathway otherwise imbalanced with respect to cofactor usage if the steady state concentrations of NADH and NADPH in the cell are appropriate to allow SthA to run “backwards” or in the direction of converting NADH to NADPH. It is to be expected that the concentration of the reduced cofactor NADPH has to be low in order for SthA to supply this cofactor.

[0301] This embodiment may enable higher yields of a fermentation product in a microorganism. Further, this embodiment may enable economical anaerobic production of a fermentation product, which was not possible without the teachings of this embodiment. Further, this embodiment may enable aerobic production of a fermentation product at higher yield, which was not possible without the teachings of this embodiment.

### Microorganism Characterized by Providing Cofactor Balance Via Overexpression of an NADPH-Dependent GAPDH

[0302] Conversion of glucose to pyruvate via glycolysis in E. coli leads to the production of two moles of NADH. A metabolic pathway that converts pyruvate to a target product that consumes either two moles of NADPH or one mole of NADH and one mole of NADPH leads to cofactor imbalance. For example, the isobutanol metabolic pathway that converts glucose to two moles of pyruvate via glycolysis to 1 mole of isobutanol generates two moles of NADH and consumes two moles of NADPH and thus is imbalanced with respect to cofactor usage.

[0303] GAPDH catalyzes the conversion of glyceraldehyde 3-phosphate (GAP) to 1,3-diphosphate glycerate as part of glycolysis. For example, in E. coli GAPDH is encoded by gapA which is NADH-dependent and is active in glycolysis as well as in gluconeogenesis [DellaSeta, F., et al., Characterization of Escherichia coli strains with gapA and gapB genes deleted. Journal of Bacteriology, 1997. 179(16): p. 5218-5221.]. GAPDH proteins from other organisms vary in their cofactor requirements.

[0304] Thus in an embodiment, a recombinant microorganism that produces a compound may express a GAPDH is that uses the same cofactor as the fermentative pathway for the production of said compound. For example, in case of an isobutanol biosynthetic pathway that consumes two moles of NADPH per mole of pyruvate an NADPH-dependent GAPDH may be utilized to provide a metabolic pathway that is balanced with respect to cofactor usage (FIG. 3). In such an embodiment, it may also be desirable to increase the concentration of NADPH in the cell by overexpression of other enzymes for the metabolic synthesis of NADPH cofactor. In other embodiments, it may also be desirable to increase the concentration of NADPH in the cell by overexpression of other enzymes for the metabolic synthesis of NADPH cofactor.

[0305] Thus, such an NADPH-dependent GAPDH may be expressed in a recombinant microorganism. NADPH-dependent GAPDH enzymes may be identified by analysis with an in vitro enzyme assay. Further, some NADPH-dependent GAPDH enzymes may be identified by analysis of protein identity, similarity, or homology. Further, genes that encode NADPH-dependent GAPDH enzymes may be identified by analysis of gene identity, similarity, or homology.

[0306] One NADPH-dependent GAPDH according to the present invention with reported high activity with NADPH is Gdp1 from Kluyveromyces lactis [Verho, R., et al., Identification of the first fungal NADP-GAPDH from Kluyveromyces lactis. Biochemistry, 2002. 41(46): p. 13833-13838.]. Gdp1 has been expressed in Saccharomyces cerevisiae to improve ethanol fermentations on xylose as a substrate [Verho, R., et al., Engineering redox cofactor regeneration for improved pentose fermentation in Saccharomyces cerevisiae. Applied and Environmental Microbiology, 2003. 69(10): p. 5892-5897.] Expression of Gdp1 improved the yield of the fermentation from 18 to 23% and from 24 to 41% when it was coupled to a zwf1 deletion which forces more flux through glycolysis. Purified Gdp1 was shown in the literature to be as active with NAD+ as it is with NADP+. Thus, the intracellular concentrations and more importantly the redox ratio of the cofactors in a recombinant microorganism according to the present invention will dictate which cofactor is used in glycolysis.

[0307] Another NADPH accepting GAPDH is found in Clostridium acetobutylicum and is coded by the gene gapC. Additional homologs of NADPH-dependent GAPDH enzymes may be found in thermotolerant bacteria. Other alternatives of such GAPDH enzymes are those found in cyanobacteria.

[0308] A different class of enzymes that can be used to generate NADPH from glucose during glycolysis is comprised of the NADP+-dependent GAPDH (non-phosphorylating). Such enzymes are designated as GapN. However, use of this enzyme results in a loss of one ATP per pyruvate produced. Thus, the production of one NADPH is coupled to a reduction of ATP yield by 1 ATP.

[0309] To provide cofactor balance in a recombinant microorganism via an NADPH-dependent GAPDH, it may be necessary to deactivate the native NADH-dependent GAPDH. For example, in the host strain E. coli the gapA gene may be deleted.

[0310] Another way to force the cell to produce NADPH with GDP1 is the elimination of flux through the PPP. This can be accomplished by deletion of the gene that encodes 6-Phosphogluconate dehydrogenase or decreasing the activity of 6-Phosphogluconate dehydrogenase. For example, in E. coli 6-Phosphogluconate dehydrogenase is encoded by zwf. The mutation of zwf eliminates flux through the PPP and may force the microorganism to utilize glycolysis in which the heterologously expressed GAPDH will utilize the cofactor NADP+ instead of NADH.

[0311] Alternatively, cofactor imbalance in a recombinant microorganism Alternatively, cofactor imbalance in a recombinant microorganism that produces a fermentation product may be alleviated by engineering the native GAPDH to accept NADPH as cofactor. A crystal structure is available from the Palinurus versicolor GAPDH which can be used to model the structures of GDP1, GapA (E. coli) and other GAPDH enzymes with different cofactor specificities. It is known that an aspartate residue in the NAD binding site is conserved among the NAD dependent GAPDHs. This residue is replaced by asparagine in GDP1.

[0312] Additional target amino acids may be found using sequence alignments and structure modeling for site directed mutagenesis. The gapA gene can be mutated using saturation mutagenesis or random mutagenesis according to protein engineering methods known to those skilled in the art. The library of mutant genes may be transformed into microorganisms carrying a zwf deletion and expressing a metabolic pathway that is imbalanced with respect to cofactor usage pathway genes. Mutant enzymes that are NADPH-dependent may be identified in those microorganism that grow on a growth medium. In certain embodiments, it may not be necessary to delete the zwf gene. Alternate genes known to one skilled in the art may be deleted from the organism that in effect inhibits flux through the pentose phosphate pathway.

[0313] This embodiment may enable higher yields of a fermentation product in a microorganism. Further, this embodiment may enable anaerobic production of a fermentation product, which was not possible without the teachings of this embodiment. Further, this embodiment may enable anaerobic production of a fermentation product at higher yield, which was not possible without the teachings of this embodiment.

### Microorganism Characterized by Providing Cofactor Balance Via a Transhydrogenase Cycle

[0314] Conversion of glucose to pyruvate via glycolysis in E. coli leads to the production of two moles of NADH. A metabolic pathway that converts pyruvate to a target product that consumes either two moles of NADPH or one mole of NADH and one mole of NADPH leads to cofactor imbalance. For example, the isobutanol metabolic pathway that converts glucose to two moles of pyruvate via glycolysis to 1 mole of isobutanol generates two moles of NADH and consumes two moles of NADPH and thus is imbalanced with respect to cofactor usage.

[0315] This cofactor imbalance may be resolved using two dehydrogenase enzymes that catalyze the same reaction but use different cofactors. One example for such a pair of enzymes are the malic enzymes MaeA and MaeB. MaeA is NADH-dependent and MaeB is NADPH-dependent and both catalyze the conversion of malate to pyruvate [Bologna, F. P., C. S. Andreo, and M. F. Drincovich, Escherichia coli malic enzymes: Two isoforms with substantial differences in kinetic properties, metabolic regulation, and structure. Journal of Bacteriology, 2007. 189(16): p. 5937-5946.]. The reaction catalyzed by each of these two enzymes is reversible. The kinetics of the two malic enzymes and the different concentrations and redox ratios of the cofactors they use might allow the NADH-dependent enzyme to run in the oxidative direction while the NADPH-dependent enzyme catalyses the reductive direction of the same conversion. In effect the enzymes would catalyze the interconversion of pyruvate and malate coupled to the consumption of NADH and the generation of NADPH (FIG. 4).

[0316] Thus the two malic enzymes may function like a transhydrogenase. This cofactor conversion cycle is dependent on the redox ratios of the cofactors which depends on the kinetics of the enzymes in an metabolic pathway that is imbalanced with respect to cofactor, for example the isobutanol pathway enzyme E. coli Ilvc as well as GapA and the malic enzymes. Homologs of malic enzymes can be identified by those skilled in the art. Those enzymes may be used which show kinetic properties favoring the oxidative conversion with NAD+ as cofactor and the reductive conversion with NADPH. The E. coli enzymes may to perform these reactions but enzymes with more favorable kinetics may increase the performance of the cofactor conversion.

[0317] This embodiment may enable higher yields of a fermentation product in a microorganism. Further, this embodiment may enable anaerobic production of a fermentation product, which was not possible without the teachings of this embodiment. Further, this embodiment may enable anaerobic production of a fermentation product at higher yield, which was not possible without the teachings of this embodiment.

### Microorganism Characterized by Providing Cofactor Balance Via Metabolic Transhydrogenation Via Ppc or Pyc

[0318] Conversion of glucose to pyruvate via glycolysis in E. coli leads to the production of two moles of NADH. A metabolic pathway that converts pyruvate to a target product that consumes either two moles of NADPH or one mole of NADH and one mole of NADPH leads to cofactor imbalance. For example, the isobutanol metabolic pathway that converts glucose to two moles of pyruvate via glycolysis to 1 mole of isobutanol generates two moles of NADH and consumes two moles of NADPH and thus is imbalanced with respect to cofactor usage.

[0319] To resolve this cofactor imbalance the metabolic flux may be diverted to allow the conversion of at least one mole of NADH into NADPH. Looking at the stoichiometric network in E. coli points to a pathway that allows such a conversion of cofactors (FIG. 5).

[0320] Flux from PEP to pyruvate can be replaced by flux from PEP to oxaloacetate, to malate, to pyruvate. To redirect the flux in such a way the native conversion from PEP to pyruvate has to be removed from the network by deletion of the genes coding for pyruvate kinase (pykA, pykF). The other enzymes required are phosphoenolpyruvate carboxylase (Ppc) or phosphoenolpyruvate carboxykinase (Pck) for the conversion of PEP to oxaloacetate, malate dehydrogenase (mdh) for the conversion of oxaloacetate to malate and MaeB for the conversion of malate to pyruvate. The choice whether to use ppc or pck for the conversion of PEP to oxaloacetate depends on the energy load of the isobutanol production strain. With the deletion of Pyk the ATP yield of the strain is reduced if Ppc is used. If Pck is used instead the ATP yield is the same as when the flux goes from PEP to pyruvate using Pyk. Under production condition the strain will only need limited amounts of ATP for cell maintenance. This energy requirement might be lower than the two ATP per glucose generated by glycolysis. By overexpressing ppc, pck or both enzymes the energy yield of the conversion of PEP to pyruvate can be varied between one and two moles of ATP.

[0321] The native expression levels of some or all of the enzymes used in the above described conversion from PEP to pyruvate is expected to be insufficient to sustain the high glycolytic flux necessary in the isobutanol production strain. As an example the expression level of mdh is reduced in the presence of glucose and it is further reduced two-fold under anaerobic conditions. Therefore these enzymes may be overexpressed. To allow conversion of 50% of the NADH generated through glycolysis to NADPH the NADH-dependent malic enzyme MaeA may be deleted. Further the enzyme Mqo was reported to catalyze the conversion of malate to oxaloacetate and may be deleted to allow maximum flux in the opposite direction. The thermodynamic equilibrium of the conversion of malate to oxaloacetate lies on the malate side and Mdh catalyzes the reduction of oxaloacetate under anaerobic respiration and under fermentative conditions.

[0322] Flux through the PPP may be avoided by adding the deletion of zwf to the strain which eliminates glucose 6-phosphate 1-dehydrogenase the first committed step of the oxidative PPP.

[0323] This embodiment may enable higher yields of a fermentation product in a microorganism. Further, this embodiment may enable anaerobic production of a fermentation product, which was not possible without the teachings of this embodiment. Further, this embodiment may enable anaerobic production of a fermentation product at higher yield, which was not possible without the teachings of this embodiment.

### Yeast Microorganism Characterized by Providing Cofactor Balance

[0324] The aforementioned methods to provide cofactor balance are generally applicable to many microorganisms, including yeast microorganisms. Specifically, however, in yeast, metabolic transhydrogenation may accomplished by introduction of NADPH dependent malic enzyme into yeast. If the conversion of phosphoenol pyruvate to pyruvate by pyruvate kinase is disrupted then the carbon flux can go through a pyruvate kinase bypass that goes from PEP to oxaloacetate to malate and from there to pyruvate. The conversion of oxaloacetate to malate by Mdh consumes one NADH and the conversion of malate to pyruvate by the heterologous malic enzyme produces one NADPH. NADPH dependent malic enzymes are common in bacteria and one example is E. coli MaeB. If the NADPH cofactor is needed in the mitochondria the malic enzyme expression can be directed into this organelle instead of the cytoplasm by addition of mitochondrial targeting sequence to the N-terminus or C-terminus of the gene. Also, the yeast enzyme Mae1, which is physiologically localized in the mitochondria can be overexpressed. Malate as well as pyruvate is shuttled across the mitochondrial membranes enabling the pyruvate bypass to effectively convert one cytoplasmic NADH into a mitochondrial NADPH. In yeast the complete carbon flux can be diverted in this way since there is no phosphotransferase (pts) system for glucose import and all PEP generated by glycolysis is available. However, one ATP is lost per NADPH produced through the yeast pyruvate kinase bypass.

[0325] Yeast do not have transhydrogenases. The heterologous expression of bacterial, plant or other eukaryotic transhydrogenases in yeast can be used to provide cofactor balance. The transhydrogenases that natively convert NADH to NADPH are generally membrane proteins that use the proton motive force to drive the reaction they are catalyzing. Bacterial transhydrogenases are in the cell membrane while plant and mammalian transhydrogenases are located in the inner mitochondrial membrane. For the heterologous transhydrogenase expression these enzymes can be targeted either to the cytoplasmic membrane or to the mitochondrial membrane in yeast. To achieve this leader sequences have to be added to the heterologous proteins. The mechanisms of membrane targeting are well understood and the direction of normally cytosolic proteins to the mitochondrium has been demonstrated. These targeting mechanisms are well conserved throughout the eukaryotes, which was demonstrated by the use of plant mitochondrial targeting sequences in yeast. Eukaryotic transhydrogenases are expressed in yeast with their native targeting and sorting sequences. Bacterial transhydrogenases are fused to mitochondrial targeting and membrane sorting sequences that have been characterized in yeast membrane proteins.

[0326] An alternative approach for the production of NADPH is the use of biosynthetic pathway enzymes. An NADH kinase could phosphorylate NADH to NADPH. Then the NADP+ needs to be dephosphorylated to NAD+ to maintain NAD+ pool. This can be carried out by an NADP phosphatase.

### Microorganisms Characterized by Providing Cofactor Balance Via Engineered Enzymes

[0327] Conversion of one mole of glucose to two moles of pyruvate via glycolysis leads to the production of two moles of NADH. A metabolic pathway that converts pyruvate to a target product that consumes either two moles of NADPH or one mole of NADH and one mole of NADPH leads to cofactor imbalance. One example of such a metabolic pathway is the isobutanol metabolic pathway described by Atsumi et al. (Atsumi et al., 2008, Nature 451(7174): 86-9) which converts two moles of pyruvate to one mole of isobutanol. In this five enzyme pathway, two enzymes are dependent upon NADPH: (1) KARI and (2) ADH, encoded by the E. coli ilvC and E. coli yqhD, respectively.

[0328] To resolve this cofactor imbalance, the present invention provides a recombinant microorganism in which the NADPH-dependent enzymes KARI and ADH are replaced with enzymes that preferentially depend on NADH (i.e. KARI and ADH enzymes that are NADH-dependent).

[0329] To further resolve this cofactor imbalance, the present invention in another embodiment provides recombinant microorganisms wherein the NADH-dependent KARI and ADH enzymes are overexpressed.

[0330] In one aspect, such enzymes may be identified in nature. In an alternative aspect, such enzymes may be generated by protein engineering techniques including but not limited to directed evolution or site-directed mutagenesis.

[0331] In one embodiment, the two NADPH-dependent enzymes within an isobutanol biosynthetic pathway that converts pyruvate to isobutanol may be replaced with ones that utilize NADH. These two enzymes may be an NADH-dependent KARI (NKR) and an NADH-dependent alcohol dehydrogenase.

[0332] In another embodiment, two NADH-dependent enzymes that catalyze the same reaction as the NADPH-dependent enzymes are overexpressed. These two enzymes may be an NADH-dependent KARI (NKR) and an NADH-dependent alcohol dehydrogenase.

[0333] In one aspect, NADH-dependent KARI and ADH enzymes are identified in nature. In another aspect, the NADPH-dependent KARI and ADH enzymes may be engineered using protein engineering techniques including but not limited to directed evolution and site-directed mutagenesis.

[0334] There exist two basic options for engineering NADH-dependent alcohol dehydrogenases or ketol-acid reductoisomerases: (1) increase the NADH-dependent activity of an NADPH-dependent enzyme that is active towards the substrate of interest and/or (2) increase the activity of an NADH-dependent enzyme that is not sufficiently active towards the substrate of interest.

### NADH-Dependent KARI Enzymes

[0335] As shown in FIG. 1, the ketol-acid reductoisomerase (KARI) enzyme of the isobutanol biosynthetic pathway as disclosed by Atsumi et al (Atsumi et al., 2008, Nature 451(7174): 86-9, herein incorporated by reference in its entirety), requires the cofactor nicotinamide dinucleotide phosphate (NADPH) to convert acetolactate to 2,3-dihydroxyisovalerate. However, under anaerobic conditions, NADPH is produced only sparingly by the cell—nicotinamide adenine dinucleotide (NADH) is the preferred equivalent. Therefore, oxygen is required to produce NADPH in the large quantities to support high-level production of isobutanol. Thus, the production of isobutanol is feasible only under aerobic conditions and the maximum yield that can be achieved with this pathway is limited. Accordingly, KARI enzymes that preferentially utilize NADH rather than NADPH are desirable.

[0336] Other biosynthetic pathways utilize KARI enzymes for the conversion of acetolactate to 2-3-dihydroxyisovalerate. For example, KARI enzymes convert acetolactate to 2-3-dihydroxyisovalerate as part of the biosynthetic pathway for the production of 3-methyl-1-butanol (Atsumi et al., 2008, Nature 451(7174): 86-9, herein incorporated by reference in its entirety).

[0337] Yet other biosynthetic pathways utilize KARI to convert 2-aceto-2-hydroxy-butyrate to 2,3-dihydroxy-3-methylvalerate. This reaction is part of the biosynthetic pathway for the production of 2-methyl-1-butanol. (Atsumi et al., 2008, Nature 451(7174): 86-9, herein incorporated by reference in its entirety).

[0338] As used herein, the term “KARI” or “KARI enzyme” or “ketol-acid reductoisomerase” are used interchangeably herein to refer to an enzyme that catalyzes the conversion of acetolactate to 2,3-dihydroxyisovalerate and/or the conversion of 2-aceto-2-hydroxy-butyrate to 2,3-dihydroxy-3-methylvalerate. Moreover, these terms can be used interchangeably herein with the terms “acetohydroxy acid isomeroreductase” and “acetohydroxy acid reductoisomerase.”

[0339] There are two classes of KARI enzymes known in the art: (1) short-form KARIs and (2) long-form KARIs. As used herein, the short-form versions of KARI are generally referred to as “Class I ketol-acid reductoisomerases” and typically have less than 415 amino acid residues. These “Class I ketol-acid reductoisomerases” are distinct from the long-form KARIs. As used herein, the long-form versions of KARI are generally referred to as “class II ketol-acid reductoisomerases” and typically have more than 415 amino acid residues. An alignment of available class II ketol-acid reductoisomerases is illustrated in FIG. 51. These class II ketol-acid reductoisomerases are further depicted in Table 44, and their corresponding sequences are found in the attached sequence listing as SEQ ID NOs: 13 and 331-676.

[0340] Enzymes for use in the compositions and methods of the invention include any enzyme having the ability to convert acetolactate to 2,3-dihydroxyisovalerate and/or the ability to convert 2-aceto-2-hydroxy-butyrate to 2,3-dihydroxy-3-methylvalerate. Such enzymes include, but are not limited to, the E. coli ilvC gene product and the S. cerevisiae ilv5 gene product, and the KARI enzyme from Piromyces sp, Buchnera aphidicola, Spinacia oleracea, Oryza sativa, Chlamydomonas reinhardtii, Neurospora crassa, Schizosaccharomyces pombe, Laccaria bicolor, Ignicoccus hospitalis, Picrophilus torridus, Acidiphilium cryptum, Cyanobacteria/Synechococcus sp., Zymomonas mobilis, Bacteroides thetaiotaomicron, Methanococcus maripaludis, Vibrio fischeri, Shewanella sp, Gramella forsetti, Psychromonas ingrhamaii, and Cytophaga hutchinsonii.

[0341] There are two distinct categories of KARI enzymes known in the art: (1) KARI enzymes which are dependent upon the use of NADPH as a cofactor, categorized into enzyme classification (EC) number 1.1.1.86; and (2) KARI enzymes which are dependent upon the use of NADH as a cofactor (i.e., an NADH-dependent KARI or “NKR”.)

[0342] As noted above, unmodified KARI enzymes are known by the EC number 1.1.1.86. Once modified to be NADH-dependent, the NADH-dependent KARI enzyme no longer belongs to EC number 1.1.1.86, which specifically requires that the enzyme use NADPH to catalyze the conversion of acetolactate to 2,3-dihydroxyisovalerate. Sequences of unmodified KARI enzymes are available from a vast array of microorganisms, including, but not limited to, Escherichia coli (GenBank Nos: NP_{—}418222 and NC_{—}000913, Saccharomyces cerevisiae (GenBank Nos: NP_{—}013459 and NC_{—}001144, Methanococcus maripaludis (GenBank Nos: CAF30210 and BX957220, and Bacillus subtilis (GenBank Nos: CAB14789 and Z99118) and the KARI enzymes from Piromyces sp (GenBank No: CAA76356), Buchnera aphidicola (GenBank No: AAF13807), Spinacia oleracea (GenBank Nos: Q01292 and CAA40356), Oryza sativa (GenBank No: NP_{—}001056384) Chlamydomonas reinhardtii (GenBank No: XP_{—}001702649), Neurospora crassa (GenBank No: XP_{—}961335), Schizosaccharomyces pombe (GenBank No: NP_{—}001018845), Laccaria bicolor (GenBank No: XP_{—}001880867), Ignicoccus hospitalis (GenBank No: YP_{—}001435197), Picrophilus torridus (GenBank No: YP_{—}023851), Acidiphilium cryptum (GenBank No: YP_{—}001235669), Cyanobacteria/Synechococcus sp. (GenBank No: YP_{—}473733), Zymomonas mobilis (GenBank No: YP_{—}162876), Bacteroides thetaiotaomicron (GenBank No: NP_{—}810987), Methanococcus maripaludis (GenBank No: YP_{—}001097443), Vibrio fischeri (GenBank No: YP_{—}205911), Shewanella sp (GenBank No: YP_{—}732498), Gramella forsetti (GenBank No: YP_{—}862142), Psychromonas ingrhamaii (GenBank No: YP_{—}942294), and Cytophaga hutchinsonii (GenBank No: YP_{—}677763).

[0343] As will be understood by one of ordinary skill in the art, modified KARI enzymes may be obtained by recombinant or genetic engineering techniques that are routine and well-known in the art. Mutant KARI enzymes can, for example, be obtained by mutating the gene or genes encoding the KARI enzyme of interest by site-directed or random mutagenesis. Such mutations may include point mutations, deletion mutations and insertional mutations. For example, one or more point mutations (e.g., substitution of one or more amino acids with one or more different amino acids) may be used to construct mutant KARI enzymes of the invention.

[0344] Ketol-acid reductoisomerase catalyzes the reduction of acetolactate to 2,3-dihydroxyisovalerate. The two-step reaction involves an alkyl migration and a ketone reduction that occurs at a single active site on the enzyme without dissociation of any reaction intermediates. The unmodified, wild-type versions of KARI are NADPH-dependent. The cofactor specificity may be expanded or switched so that it will utilize both cofactors and preferentially NADH during the production of isobutanol. In an exemplary embodiment, the cofactor specificity may be altered such that the KARI enzyme exclusively uses NADH during the production of isobutanol. A study published in 1997 (Rane, M. J. and K. C. Calvo, Archives of Biochemistry and Biophysics, 1997. 338(1): p. 83-89) describes a supposed cofactor-switched KARI quadruplet variant of the E. coli ilvC gene product with mutations R68D, K69L, K75V and R76D). However, in-house studies indicate that although the ratio NADH/NADPH was 2.5, the specific activity of this variant on NADH was actually worse than wild-type (Table 25), rendering this enzyme not suited for the purpose of this disclosure.

### Modified or Mutated KARI Enzymes

[0345] In accordance with the invention, any number of mutations can be made to the KARI enzymes, and in a preferred aspect, multiple mutations can be made to result in an increased ability to utilize NADH for the conversion of acetolactate to 2,3-dihydroxyisovalerate. Such mutations include point mutations, frame shift mutations, deletions, and insertions, with one or more (e.g., one, two, three, or four, etc.) point mutations preferred.

[0346] Mutations may be introduced into the KARI enzymes of the present invention using any methodology known to those skilled in the art. Mutations may be introduced randomly by, for example, conducting a PCR reaction in the presence of manganese as a divalent metal ion cofactor. Alternatively, oligonucleotide directed mutagenesis may be used to create the mutant KARI enzymes which allows for all possible classes of base pair changes at any determined site along the encoding DNA molecule. In general, this technique involves annealing an oligonucleotide complementary (except for one or more mismatches) to a single stranded nucleotide sequence coding for the KARI enzyme of interest. The mismatched oligonucleotide is then extended by DNA polymerase, generating a double-stranded DNA molecule which contains the desired change in sequence in one strand. The changes in sequence can, for example, result in the deletion, substitution, or insertion of an amino acid. The double-stranded polynucleotide can then be inserted into an appropriate expression vector, and a mutant or modified polypeptide can thus be produced. The above-described oligonucleotide directed mutagenesis can, for example, be carried out via PCR.

[0347] The invention further includes homologous KARI enzymes which are 5%, 10%, 20%, 30%, 40%, 50%, 60%, 70%, 75%, 80%, 85%, 90%, 95%, 96%, 97%, 98%, or 99% identical at the amino acid level to a wild-type KARI enzyme (e.g., encoded by the Ec_ilvC gene or S. cerevisiae ilv5 gene) and exhibit an increased ability to utilize NADH for the conversion of acetolactate to 2,3-dihydroxyisovalerate. Also included within the invention are KARI enzymes which are 50%, 60%, 70%, 75%, 80%, 85%, 90%, 95%, 96%, 97%, 98%, or 99% identical at the amino acid level to a KARI enzyme comprising the amino acid sequence set out in SEQ ID NO: 13 and exhibit an increased ability to utilize NADH for the conversion of acetolactate to 2,3-dihydroxyisovalerate. The invention also includes nucleic acid molecules which encode the above described KARI enzymes.

[0348] The invention also includes fragments of KARI enzymes which comprise at least 50, 100, 150, 200, 250, 300, 350, 400, 450, 500, 550, or 600 amino acid residues and retain one or more activities associated with KARI enzymes. Such fragments may be obtained by deletion mutation, by recombinant techniques that are routine and well-known in the art, or by enzymatic digestion of the KARI enzyme(s) of interest using any of a number of well-known proteolytic enzymes. The invention further includes nucleic acid molecules which encode the above described mutant KARI enzymes and KARI enzyme fragments.

[0349] By a protein or protein fragment having an amino acid sequence at least, for example, 50% “identical” to a reference amino acid sequence it is intended that the amino acid sequence of the protein is identical to the reference sequence except that the protein sequence may include up to 50 amino acid alterations per each 100 amino acids of the amino acid sequence of the reference protein. In other words, to obtain a protein having an amino acid sequence at least 50% identical to a reference amino acid sequence, up to 50% of the amino acid residues in the reference sequence may be deleted or substituted with another amino acid, or a number of amino acids up to 50% of the total amino acid residues in the reference sequence may be inserted into the reference sequence. These alterations of the reference sequence may occur at the amino (N-) and/or carboxy (C-) terminal positions of the reference amino acid sequence and/or anywhere between those terminal positions, interspersed either individually among residues in the reference sequence and/or in one or more contiguous groups within the reference sequence. As a practical matter, whether a given amino acid sequence is, for example, at least 50% identical to the amino acid sequence of a reference protein can be determined conventionally using known computer programs such as those described above for nucleic acid sequence identity determinations, or using the CLUSTAL W program (Thompson, J. D., et al., Nucleic Acids Res. 22:4673 4680 (1994)).

[0350] In one aspect, amino acid substitutions are made at one or more of the above identified positions (i.e., amino acid positions equivalent or corresponding to A71, R76, S78, or Q110 of E. coli IlvC). Thus, the amino acids at these positions may be substituted with any other amino acid including Ala, Asn, Arg, Asp, Cys, Gln, Glu, Gly, His, Ile, Leu, Lys, Met, Phe, Pro, Ser, Thr, Trp, Tyr, and Val. A specific example of a KARI enzyme which exhibits an increased ability to utilize NADH includes an E. coli IlvC KARI enzyme in which (1) the alanine at position 71 has been replaced with a serine, (2) the arginine at position 76 has been replaced with an aspartic acid, (3) the serine at position 78 has been replaced with an aspartic acid, and/or (4) the glutamine at position 110 has been replaced with valine.

[0351] In another aspect, the present application provides modified class II KARI enzymes, wherein said modified class II KARI enzymes are derived from unmodified class II KARI enzymes that have been engineered to comprise an amino acid substitution corresponding to amino acid residue Serine 78 of the E. coli KARI (SEQ ID NO: 13), and wherein said modified class II KARI exhibits an increased ability to use NADH as a cofactor to catalyze the conversion of acetolactate to 2,3-dihydroxyisovalerate as compared to a corresponding unmodified class II KARI. In one embodiment, the amino acid residue corresponding to the Serine 78 of E. coli KARI (SEQ ID NO: 13) is replaced with an amino acid residue selected from the group consisting of aspartic acid and glutamic acid. In further embodiments, the modified class II KARI enzymes may independently or additionally comprise an amino acid substitution corresponding to one or more amino acid residues selected from the group consisting of alanine 71, arginine 76, and glutamine 110 of the E. coli KARI (SEQ ID NO: 13). In some embodiments, the unmodified class II KARI is derived from a genus selected from the group consisting of Escherichia, Shigella, Yersinia, Klebsiella, Vibrio, Providencia, Haemophilus, Shewanella, and Salmonella. In further embodiments, the unmodified class II KARI comprises SEQ ID NO: 13. In yet further embodiments, the unmodified class II KARI comprises an amino acid sequence selected from the group consisting of SEQ ID NOs: 331-676

[0352] Polypeptides having the ability to convert acetolactate to 2,3-dihydroxyisovalerate and/or 2-aceto-2-hydroxy-butyrate to 2,3-dihydroxy-3-methylvalerate for use in the invention may be isolated from their natural prokaryotic or eukaryotic sources according to standard procedures for isolating and purifying natural proteins that are well-known to one of ordinary skill in the art (see, e.g., Houts, G. E., et al., J. Virol. 29:517 (1979)). In addition, polypeptides having the ability to convert acetolactate to 2,3-dihydroxyisovalerate and/or 2-aceto-2-hydroxy-butyrate to 2,3-dihydroxy-3-methylvalerate may be prepared by recombinant DNA techniques that are familiar to one of ordinary skill in the art (see, e.g., Kotewicz, M. L., et al., Nucl. Acids Res. 16:265 (1988); Soltis, D. A., and Skalka, A. M., Proc. Natl. Acad. Sci. USA 85:3372 3376 (1988)).

[0353] In accordance with the invention, one or more mutations may be made in any KARI enzyme of interest in order to increase the ability of the enzyme to utilize NADH, or confer other properties described herein upon the enzyme, in accordance with the invention. Such mutations include point mutations, frame shift mutations, deletions and insertions. Preferably, one or more point mutations, resulting in one or more amino acid substitutions, are used to produce KARI enzymes having an enhanced or increased ability to utilize NADH, particularly to facilitate the conversion of acetolactate to 2,3-dihydroxyisovalerate and/or the conversion of 2-aceto-2-hydroxy-butyrate to 2,3-dihydroxy-3-methylvalerate. In a preferred aspect of the invention, one or more mutations at positions equivalent or corresponding to position A71 (e.g., A71S), R76 (e.g., R76D), S78 (e.g. S78D), and/or Q110 (e.g. Q110V) and/or D146 (e.g. D146G), and/or G185 (e.g. G185R) and/or K433 (e.g. K433E) of the E. coli IlvC KARI enzyme may be made to produce the desired result in other KARI enzymes of interest.

[0354] The corresponding positions of the KARI enzymes identified herein (e.g. E. coli IlvC may be readily identified for other KARI enzymes by one of skill in the art. Thus, given the defined region and the assays described in the present application, one with skill in the art can make one or a number of modifications which would result in an increased ability to utilize NADH, particularly for the conversion of acetolactate to 2,3-dihydroxyisovalerate, in any KARI enzyme of interest. Residues to be modified in accordance with the present invention may include those described in Examples 14, 15, and 16.

[0355] In a preferred embodiment, the modified or mutated KARI enzymes have from 1 to 4 amino acid substitutions in amino acid regions involved in cofactor specificity as compared to the wild-type KARI enzyme proteins. In other embodiments, the modified or mutated KARI enzymes have additional amino acid substitutions at other positions as compared to the respective wild-type KARI enzymes. Thus, modified or mutated KARI enzymes may have at least about 2, 3, 4, 5, 6, 7, 8, 9, 10, 11, 12, 13, 14, 15, 16, 17, 18, 19, 20, 21, 22, 23, 24, 25, 26, 27, 28, 29, 30, 31, 32, 33, 34, 35, 36, 37, 38, 39, 40 different residues in other positions as compared to the respective wild-type KARI enzymes. As will be appreciated by those of skill in the art, the number of additional positions that may have amino acid substitutions will depend on the wild-type KARI enzyme used to generate the variants. Thus, in some instances, up to 50 different positions may have amino acid substitutions.

[0356] The nucleotide sequences for several KARI enzymes are known. For instance, the sequences of KARI enzymes are available from a vast array of microorganisms, including, but not limited to, Escherichia coli (GenBank No: NP_{—}418222), Saccharomyces cerevisiae (GenBank Nos: NP_{—}013459, Methanococcus maripaludis (GenBank No: YP_{—}001097443), Bacillus subtilis (GenBank Nos: CAB14789), and the KARI enzymes from Piromyces sp (GenBank No: CAA76356), Buchnera aphidicola (GenBank No: AAF13807), Spinacia oleracea (GenBank Nos: Q01292 and CAA40356), Oryza sativa (GenBank No: NP_{—}001056384) Chlamydomonas reinhardtii (GenBank No: XP_{—}001702649), Neurospora crassa (GenBank No: XP_{—}961335), Schizosaccharomyces pombe (GenBank No: NP_{—}001018845), Laccaria bicolor (GenBank No: XP_{—}001880867), Ignicoccus hospitalis (GenBank No: YP_{—}001435197), Picrophilus torridus (GenBank No: YP_{—}023851), Acidiphilium cryptum (GenBank No: YP_{—}001235669), Cyanobacteria/Synechococcus sp. (GenBank No: YP_{—}473733), Zymomonas mobilis (GenBank No: YP_{—}162876), Bacteroides thetaiotaomicron (GenBank No: NP_{—}810987), Methanococcus maripaludis (GenBank No: YP_{—}001097443), Vibrio fischeri (GenBank No: YP_{—}205911), Shewanella sp (GenBank No: YP_{—}732498), Gramella forsetti (GenBank No: YP_{—}862142), Psychromonas ingrhamaii (GenBank No: YP_{—}942294), and Cytophaga hutchinsonii (GenBank No: YP_{—}677763).

### Improved NADH-Dependent Activity

[0357] In one aspect, the NADH-dependent activity of the modified or mutated KARI enzyme is increased.

[0358] In an exemplary embodiment, the catalytic efficiency of the modified or mutated KARI enzyme is improved for the cofactor NADH. Preferably, the catalytic efficiency of the modified or mutated KARI enzyme is improved by at least about 5% as compared to the wild-type or parental KARI for NADH. More preferably the catalytic efficiency of the modified or mutated KARI enzyme is improved by at least about 15% as compared to the wild-type or parental KARI for NADH. More preferably, the catalytic efficiency of the modified or mutated KARI enzyme is improved by at least about 25% as compared to the wild-type or parental KARI for NADH. More preferably, the catalytic efficiency of the modified or mutated KARI enzyme is improved by at least about 50% as compared to the wild-type or parental KARI for NADH. More preferably, the catalytic efficiency of the modified or mutated KARI enzyme is improved by at least about 75% as compared to the wild-type or parental KARI for NADH. More preferably, the catalytic efficiency of the modified or mutated KARI enzyme is improved by at least about 100% as compared to the wild-type or parental KARI for NADH. More preferably, the catalytic efficiency of the modified or mutated KARI enzyme is improved by at least about 300% as compared to the wild-type or parental KARI for NADH. More preferably, the catalytic efficiency of the modified or mutated KARI enzyme is improved by at least about 500% as compared to the wild-type or parental KARI for NADH. More preferably, the catalytic efficiency of the modified or mutated KARI enzyme is improved by at least about 1000% as compared to the wild-type or parental KARI for NADH. More preferably, the catalytic efficiency of the modified or mutated KARI enzyme is improved by at least about 5000% as compared to the wild-type or parental KARI for NADH.

[0359] In another exemplary embodiment, the catalytic efficiency of the modified or mutated KARI enzyme with NADH is increased with respect to the catalytic efficiency of the wild-type or parental enzyme with NADPH. Preferably, the catalytic efficiency of the modified or mutated KARI enzyme is at least about 10% of the catalytic efficiency of the wild-type or parental KARI enzyme for NADPH. More preferably, the catalytic efficiency of the modified or mutated KARI enzyme is at least about 25% of the catalytic efficiency of the wild-type or parental KARI enzyme for NADPH. More preferably, the catalytic efficiency of the modified or mutated KARI enzyme is at least about 50% of the catalytic efficiency of the wild-type or parental KARI enzyme for NADPH. More preferably, the catalytic efficiency of the modified or mutated KARI enzyme is at least about 75%, 85%, 95% of the catalytic efficiency of the wild-type or parental KARI enzyme for NADPH.

[0360] In yet another exemplary embodiment, the K_{M} of the KARI enzyme for NADH is decreased relative to the wild-type or parental enzyme. A change in K_{M} is evidenced by at least a 5% or greater increase or decrease in K_{M} compared to the wild-type KARI enzyme. In certain embodiments, modified or mutated KARI enzymes of the present invention may show greater than 10 times decreased K_{M} for NADH compared to the wild-type or parental KARI enzyme. In certain embodiments, modified or mutated KARI enzymes of the present invention may show greater than 30 times decreased K_{M} for NADH compared to the wild-type or parental KARI enzyme.

[0361] In yet another exemplary embodiment, the k_{cat} of the KARI enzyme with NADH is increased relative to the wild-type or parental enzyme. A change in k_{cat} is evidenced by at least a 5% or greater increase or decrease in K_{M} compared to the wild-type KARI enzyme. In certain embodiments, modified or mutated KARI enzymes of the present invention may show greater than 50% increased k_{cat} for NADH compared to the wild-type or parental KARI enzyme. In certain embodiments, modified or mutated KARI enzymes of the present invention may show greater than 100% increased k_{cat} for NADH compared to the wild-type or parental KARI enzyme. In certain embodiments, modified or mutated KARI enzymes of the present invention may show greater than 200% increased k_{cat} for NADH compared to the wild-type or parental KARI enzyme.

### Cofactor Switch

[0362] In preferred embodiments, the cofactor specificity of the modified or mutated KARI enzyme is altered such that there is a cofactor switch from NADPH to NADH. In other words, these modified or mutated KARI enzymes will have an increase in NADH-dependent activity and a substantially simultaneous decrease in NADPH dependent activity. Thus, the methods of the present invention can be used to change the cofactor preference from NADPH to NADH.

[0363] “Cofactor specificity” is a measure of the specificity of an enzyme for one cofactor over another. Thus, the methods of the present invention may be used to alter the cofactor preference of the target enzyme, such that the preference for the less favored cofactor is increased by 20%, 50%, 100%, 300%, 500%, 1000%, up to 2000%. For example, a number of reductase enzymes have been described that favor NADPH over NADH (see WO 02/22526; WO 02.29019; Mittl, P R., et al., (1994) Protein Sci., 3: 1504 14; Banta, S., et al., (2002) Protein Eng., 15:131 140; all of which are hereby incorporated by reference in their entirety). As the availability of NADPH is often limiting, both in vivo and in vitro, the overall activity of the target protein is often limited. For target proteins that prefer NADPH as a cofactor, it would be desirable to alter the cofactor specificity of the target protein (e.g. a KARI enzyme) to a cofactor that is more readily available, such as NADH.

[0364] In a preferred embodiment, the cofactor specificity of the KARI enzyme is switched. By “switched” herein is meant, that the cofactor preference (in terms of catalytic efficiency (k_{cat}/K_{M}) of the KARI enzyme is changed to another cofactor Preferably, in one embodiment, by switching cofactor specificity, activity in terms of catalytic efficiency (k_{cat}/K_{M}) with the cofactor preferred by the wild-type KARI enzyme is reduced, while the activity with the less preferred cofactor is increased. This can be achieved, for example by increasing the k_{cat} for less preferred cofactor over the preferred cofactor or by decreasing K_{M} for the less preferred cofactor over the preferred cofactor or both.

[0365] In a preferred embodiment, the KARI enzyme is modified or a mutated to become NADH-dependent. The term “NADH-dependent” refers to the property of an enzyme to preferentially use NADH as the redox cofactor. An NADH-dependent enzyme has a higher catalytic efficiency (k_{cat}/K_{M}) with the cofactor NADH than with the cofactor NADPH as determined by in vitro enzyme activity assays. Accordingly, the term “NADPH-dependent” refers to the property of an enzyme to preferentially use NADPH as the redox cofactor. An NADPH dependent enzyme has a higher catalytic efficiency (k_{cat}/K_{M}) with the cofactor NADPH than with the cofactor NADH as determined by in vitro enzyme activity assays.

[0366] In a preferred embodiment, the catalytic efficiency of the KARI enzyme for NADH is enhanced relative to the catalytic efficiency with NADPH. The term “catalytic efficiency” describes the ratio of the rate constant k_{cat} over the Michaelis-Menten constant K_{M}. In one embodiment, the invention is directed to a modified or mutated KARI enzyme that exhibits at least about a 1:10 ratio of catalytic efficiency (k_{cat}/K_{M}) with NADH over catalytic efficiency with NADPH. In another embodiment, the modified or mutated KARI enzyme exhibits at least about a 1:1 ratio of catalytic efficiency (k_{cat}/K_{M}) with NADH over catalytic efficiency with NADPH. In yet another embodiment, the modified or mutated KARI enzyme exhibits at least about a 10:1 ratio of catalytic efficiency (k_{cat}/K_{M}) with NADH over catalytic efficiency with NADPH. In yet another embodiment, the modified or mutated KARI enzyme exhibits at least about a 100:1 ratio of catalytic efficiency (k_{cat}/K_{M}) with NADH over catalytic efficiency with NADPH. In an exemplary embodiment, the modified or mutated KARI enzyme exhibits at least about a 100:1 ratio of catalytic efficiency (k_{cat}/K_{M}) with NADH over catalytic efficiency with NADPH.

[0367] In a preferred embodiment, the K_{M} of the KARI enzyme for NADH is decreased relative to the K_{M} of the KARI enzyme for NADPH. In one embodiment, the invention is directed to a modified or mutated KARI enzyme that exhibits at least about a 10:1 ratio of K_{M} for NADH over K_{M} for NADPH. In one embodiment, the invention is directed to a modified or mutated KARI enzyme that exhibits at least about a 1:1 ratio of K_{M} for NADH over K_{M} for NADPH. In a preferred embodiment, the invention is directed to a modified or mutated KARI enzyme that exhibits at least about a 1:10 ratio of K_{M} for NADH over K_{M} for NADPH. In yet another embodiment, the invention is directed to a modified or mutated KARI enzyme that exhibits at least about a 1:20, 1:100, 1:1000 ratio of K_{M} for NADH over K_{M} for NADPH.

[0368] In another preferred embodiment, the k_{cat} of the KARI enzyme with NADH is increased relative to k_{cat} with NADPH. In certain embodiments, modified or mutated KARI enzymes of the present invention may show greater than 0.8:1 ratio of k_{cat} with NADH over k_{cat} with NADPH. In certain embodiments, modified or mutated KARI enzymes of the present invention may show greater than 1:1 ratio of k_{cat} with NADH over k_{cat} with NADPH. In a preferred embodiments, modified or mutated KARI enzymes of the present invention may show greater than 10:1 ratio of k_{cat} with NADH over k_{cat} with NADPH. In certain embodiments, modified or mutated KARI enzymes of the present invention may show greater than 100:1 ratio of k_{cat} with NADH over k_{cat} with NADPH

### Identification of Corresponding Amino Acid Substitutions in Homologous Enzymes

[0369] An amino acid sequence alignment of 22 KARIs (including E. coli IlvC, spinach KARI and rice KARI) was performed (FIG. 6). Some KARIs aligned with the E. coli KARI sequence at amino acid positions 71, 76, 78, and 110 and this allows to conclude that the beneficial mutations found for E. coli KARI confer the same effects in these KARI enzymes. Other sequences show deletions at about these positions and the sequence alignment is not sufficient to make any predictions.

[0370] A structure alignment of E. coli KARI (PDB ID NO. 1YRL) with rice KARI (PDB ID NO. 3FR8) as a representative of the shorter loop group was performed (FIG. 7). The sites of useful mutations in the E. coli context corresponded reasonably well with specific residues in the context of the shorter loop: Ser165, Lys166, and Ser167. Ser165 of (corresponding to A71 in E. coli) therefore may be substituted with aspartate. A charge reversal at position K166 (corresponding to position R76D) may yield the same result. Ser167 may correspond to Ser78 and a mutation to aspartate may be beneficial Mutations at Q110 may be transferable in all 22 KARIs aligned.

[0371] In the case of D146 (e.g. D146G), G185 (e.g. G185R), and K433 (e.g. K433E), surface charge changes took place. Glycine at position 185 and Lysine at position 433 are highly conserved among other KARIs. These mutations may therefore be transferable to other KARIs with a similar effect. Aspartate at position 146 is not as highly conserved.

[0372] In the case of class II KARI enzymes, an amino acid sequence alignment of over 300 class II KARIs is illustrated in FIG. 51. As this alignment demonstrates, class II KARIs share a conserved serine residue at the position corresponding to Serine 78 residue of the E. coli KARI of SEQ ID NO: 13. As demonstrated in Example 27, the beneficial mutation at the Serine 78 residue in the E. coli KARI is transferable to other class II KARI enzymes, including, but not limited to, class II KARI enzymes derived from a genus selected from the group consisting of Escherichia, Shigella, Yersinia, Klebsiella, Vibrio, Providencia, Haemophilus, Shewanella, and Salmonella.

### NADH-Dependent ADH Enzymes

[0373] Several alcohol dehydrogenases may be suitable candidates for conversion into an NADH-dependent isobutyraldehyde dehydrogenase. Among the preferred enzymes for conversion are S. cerevisiae ADH1, Zymomonas mobilis ADHII, E. coli YqhD, herein referred to as Ec_YqhD, and S. cerevisiae ADH7.

[0374] As described in the prior art in PCT/US2008/053514, the S. cerevisiae ADH2 gene is expected to be functionally expressed from pSA55 and required for catalyzing the final step of the isobutanol biosynthetic pathway, namely the conversion of isobutyraldehyde to isobutanol. Thus, no isobutanol should be produced with the plasmid combination lacking ADH2 as adhE is deleted in JCL260. However, as exemplified in Example 10, the results of a fermentation using a strain without overexpression of any gene encoding an enzyme with ADH activity for the conversion of isobutyraldehyde to isobutanol showed that overexpression of an ADH enzyme is not required for isobutanol production in E. coli. In fact, isobutanol production for the system lacking ADH2 was higher than for the system with ADH2 expression. Volumetric productivity and titer showed 42% increase, specific productivity showed 18% increase and yield 12% increase. This suggests strongly that a native E. coli dehydrogenase is responsible for the conversion of isobutyraldehyde to isobutanol.

[0375] Surprisingly, this last step of the isobutanol biosynthetic pathway was found to be carried out by a native E. coli dehydrogenase in the aforementioned strains, as exemplified in Example 11: Approximately ˜80% of the isobutyraldehyde reduction activity is due to Ec_YqhD under certain culture conditions. Available literature on Ec_YqhD suggests that while it does prefer long-chain alcohols, it also utilizes NADPH (versus NADH) (Perez, J. M., et al., Journal of Biological Chemistry, 2008. 283(12): p. 7346-7353).

[0376] Switching the cofactor specificity of an NADPH-dependent alcohol dehydrogenase may be complicated by the fact that cofactor binding induces a conformational change, resulting in an anhydrous binding pocket that facilitates hydride transfer from the reduced cofactor to the aldehyde (Leskovac, V., S. Trivic, and D. Pricin, Fems Yeast Research, 2002. 2: p. 481-494; Reid, M. F. and C. A. Fewson., Critical Reviews in Microbiology, 1994. 20(1): p. 13-56). Mutations that are beneficial for binding NADH may have deleterious effects with respect to this conformational change.

[0377] Alternatively, isobutyraldehyde reduction activity of an NADH-dependent enzyme with little native activity towards this substrate may be increased. This approach has the advantages that (1) several specialized enzymes exist in nature that are highly active under fermentative conditions, (2) the binding sites of several of these enzymes are known, (3) mutational studies indicate that substrate specificity can easily be altered to achieve high activity on a new substrate.

[0378] Several alcohol dehydrogenase enzymes may be suitable candidates for conversion into an NADH-dependent isobutyraldehyde dehydrogenase: S. cerevisiae ADH1 and Zymomonas mobilis ADHII are NADH-dependent enzymes responsible for the conversion of acetaldehyde to ethanol under anaerobic conditions. These enzymes are highly active. The substrate specificity for these enzymes has been analyzed (Leskovac, V., S. Trivic, and D. Pricin, Fems Yeast Research, 2002. 2: p. 481-494; Rellos, P., J. Ma, and R. K. Scopes, Protein Expression and Purification, 1997. 9: p. 89-90), the amino acid residues comprising the substrate binding pocket are known (Leskovac, V., S. Trivic, and D. Pricin, Fems Yeast Research, 2002. 2: p. 481-494; Rellos, P., J. Ma, and R. K. Scopes, Protein Expression and Purification, 1997. 9: p. 89-90), and attempts to alter the substrate specificity by mutation have revealed that the substrate specificity can be altered (Rellos, P., J. Ma, and R. K. Scopes, Protein Expression and Purification, 1997. 9: p. 89-90; Green, D. W., H. Suns, and B. V. Plapp, Journal of Biological Chemistry, 1993. 268(11): p. 7792-7798). Ec_YqhD and S. cerevisiae ADH7 are NADPH-dependent enzymes whose physiological functions are not as well understood. Ec_YqhD has been implicated in the protection of the cell from peroxide-derived aldehydes (Perez, J. M., et al., Journal of Biological Chemistry, 2008. 283(12): p. 7346-7353). The substrate specificity of both enzymes is understood, and amino acids lining the substrate binding pocket are known (Perez, J. M., et al., Journal of Biological Chemistry, 2008. 283(12): p. 7346-7353). Based on the known amino acid residues implicated in substrate binding (S. cerevisiae ADH1, Z. mobilis ADHII) or the cofactor binding site (Ec_yqhD), sites with the highest likelihood of affecting desired enzyme features such as substrate specificity or cofactor specificity may be mutated to generate the desired function.

[0379] One approach to increase activity of enzymes with NADH as the cofactor may be saturation mutagenesis with NNK libraries at each of the residues that interact with the cofactor. These libraries may be screened for activity in the presence of NADPH and NADH in order to identify which single mutations contribute to increased activity on NADH and altered specificity for NADH over NADPH. Combinations of mutations at aforementioned residues may be investigated by any method. For example, a combinatorial library of mutants may be designed based on the results of the saturation mutagenesis studies. For example, a combinatorial library of mutants may be designed including only those mutations that do not lead to decrease in NADH-dependent activity.

[0380] Another approach to increase the NADH-dependent activity of the enzyme is to perform saturation mutagenesis of a first amino acid that interacts with the cofactor, then isolate the mutant with the highest activity using NADH as the cofactor, then perform saturation mutagenesis of a second amino acid that interacts with the cofactor, and so on. Similarly, a limited number of amino acids that interact with the cofactor may be targeted for randomization simultaneously and then be screened for improved activity with NADH as the cofactor. The selected, best mutant can then be subjected to the same procedure again and this approach may be repeated iteratively until the desired result is achieved.

[0381] Another approach is to use random oligonucleotide mutagenesis to generate diversity by incorporating random mutations, encoded on a synthetic oligonucleotide, into the cofactor binding region of the enzyme. The number of mutations in individual enzymes within the population may be controlled by varying the length of the target sequence and the degree of randomization during synthesis of the oligonucleotides. The advantages of this more defined approach are that all possible amino acid mutations and also coupled mutations can be found.

[0382] If the best variants from the experiments described above are not sufficiently active with NADH as the cofactor, directed evolution via error-prone PCR may be used to obtain further improvements. Error-prone PCR mutagenesis of the first domain containing the cofactor binding pocket may be performed followed by screening for ADH activity with NADH and/or increased specificity for NADH over NADPH as the cofactor.

[0383] Surprisingly, alcohol dehydrogenase enzymes that are not known to catalyze the reduction of isobutyraldehyde to isobutanol were identified that catalyze this reaction. Thus, in another aspect, such an alcohol dehydrogenase may be encoded by an NADH-dependent 1,3-propanediol dehydrogenase. In yet another aspect, such an alcohol dehydrogenase may be encoded by an NADH-dependent 1,2-propanediol dehydrogenase. Preferred enzymes of this disclosure include enzymes listed in Table 1. These enzymes exhibit NADH-dependent isobutyraldehyde reduction activity, measured as Unit per minute per mg of crude cell lysate (U min⁻¹ mg⁻¹) that is approximately six-fold to seven-fold greater than the corresponding NADPH-dependent isobutyraldehyde reduction activity (Tables 2 and 23).

[0384] In addition to exhibiting increased activity with NADH as the cofactor as compared to the NADPH, alcohol dehydrogenases of the present invention may further be more active as compared to the native E. coli alcohol dehydrogenase Ec_YqhD. In particular, alcohol dehydrogenases of the present invention may exhibit increased activity and/or decreased K_{M} values with NADH as the cofactor as compared to Ec_YqhD with NADPH as the cofactor. Exemplary enzymes that exhibit greater NADH-dependent alcohol dehydrogenase activity than the NADPH-dependent alcohol dehydrogenase activity are listed in Table 1; activity values are listed in Table 2 and Table 23.

TABLE 1
ADH genes tested in the following fermentations, and rationale for inclusion of each

| Gene Name | SEQ ID NO | Accession Number | Rationale for inclusion |
|---|---|---|---|
| Drosophila | 60 (nucleotide | NT_033779, | NADH-dependent, broad |
| melanogaster | sequence) | REGION: | substrate specificity, well- |
| ADH | 61 (amino acid | 14615555 . . . 14618902 | expressed in bacterial |
| | sequence) | | expression systems. Different |
| | | | class of enzyme versus others |
| | | | tested (short-chain, non-metal |
| | | | binding) |
| Lactococcus | 66 (nucleotide | | NADH-dependent alcohol |
| lactis adhA | sequence) | | dehydrogenase with activity |
| | 67 (amino acid | | using isobutyraldehyde as the |
| | sequence) | | substrate (Atsumi et al., Appl. |
| | | | Microbiol. Biotechnol., 2009, |
| | | | DOI 10.1007/s00253-009- |
| | | | 2085-6) |
| Klebsiella | 62 (nucleotide | NC_011283 | NADH-utilizing 1,2-propanediol |
| pneumoniae | sequence) | | dehydrogenase |
| dhaT | 63 (amino acid | | |
| | sequence) | | |
| Escherichia | 64 (nucleotide | NC_000913.2 | Homolog of K. pneumoniae |
| coli fucO | sequence) | (2929887 . . . 2931038, | dhaT, NADH-dependent 1,3- |
| | 65 (amino acid | complement) | propanediol dehydrogenase |
| | sequence) | | |

TABLE 2
Kinetic parameters for the conversion of isobutyraldehyde to isobutanol by
Ec_YqhD, Ec_FucO, Dm_Adh, and Kp_DhaT

| | | NADH | | NADPH | |
|---|---|---|---|---|---|
| | | | Activity | | Activity |
| | | | (U/min⁻¹ mg⁻¹ | | (U/min⁻¹ mg⁻¹ |
| | | K_{M} | crude | K_{M} | crude |
| Plasmid | Adh | (mM) | lysate) | (mM) | lysate) |
| pGV1705-A | Ec_YqhD | n.d. | n.d. | 0.25 | 0.09 |
| pGV1748-A | Ec_FucO | 0.8 | 0.23 | 0.2 | 0.04 |
| pGV1749-A | Dm_Adh | 0.9 | 6.60 | 2.7 | 1.70 |
| pGV1778-A | Kp_DhaT | 1.3 | 0.56 | 0.6 | 0.08 |

[0385] Alcohol dehydrogenases of the present disclosure may also be utilized in metabolically-modified microorganisms that include recombinant biochemical pathways useful for producing additional alcohols such as 2-methyl-1-butanol, 3-methyl-1-butanol, 2-phenylethanol, 1-propanol, or 1-butanol via conversion of a suitable substrate by a modified microorganism.

[0386] Microorganisms producing such compounds have been described (PCT/US2008/053514). For example, these alcohols can be 1-propanol, 1-butanol, 2-methyl-1-butanol, 3-methyl-1-butanol or 2-phenylethanol and are generally produced from a metabolite comprising a 2-keto acid. In some aspects, the 2-keto acid includes 2-ketobutyrate, 2-ketovalerate, 2-keto-3-methylvalerate, 2-keto-4-methyl-pentanoate, or phenylpyruvate. The 2-ketoacid is converted to the respective aldehyde by a 2-ketoacid decarboxylase. For example, 2-ketobutyrate is converted to 1-propanal, 2-ketovalerate is converted to 1-butanal, 2-keto-3-methylvalerate is converted to 2-methyl-1-butanol, 2-keto-4-methyl-pentanoate is converted to 3-methyl-1-butanal, and phenylpyruvate is converted to phenylethanal by a 2-ketoacid decarboxylase. Thus, the recombinant microorganism includes elevated expression or activity of a 2-keto-acid decarboxylase, as compared to a parental microorganism. The 2-keto-acid decarboxylase may be encoded by kivd from Lactococcus lactis, or homologs thereof. The 2-keto-acid decarboxylase can be encoded by a polynucleotide derived from a gene selected from kivd from L. lactis, or homologs thereof.

[0387] In earlier publications (PCT/US2008/053514, Atsumi et al., Nature, 2008 Jan. 3; 451(7174):86-9), only NADPH-dependent alcohol dehydrogenases are described that convert the aforementioned aldehyde to an alcohol. In particular, S. cerevisiae Adh2p is described that converts the aldehyde to the respective aldehyde.

[0388] Thus, in one embodiment of this disclosure, a microorganism is provided in which the cofactor dependent final step for the conversion of the aldehyde to the respective alcohol is catalyzed by an NADH-dependent alcohol dehydrogenase. In particular, NADH-dependent alcohol dehydrogenases are disclosed that catalyze the reduction aldehydes to alcohols, for example, of 1-propanal to 1 propanol, 1-butanal to 1-butanol, 2-methyl-1-butanal to 2-methyl-1-butanol, 3-methyl-1-butanal to 3-methyl-1-butanol, or phenylethanal to phenylethanol.

[0389] In a specific aspect, such an alcohol dehydrogenase may be encoded by the Drosophila melanogaster alcohol dehydrogenase Dm_Adh or homologs thereof. In another specific aspect, such an alcohol dehydrogenase may be encoded by the Lactococcus lactis alcohol dehydrogenase Ll_AdhA (SEQ ID NO: 67), as described by Atsumi et al. (Atsumi et al., Appl. Microbiol. Biotechnol., 2009, DOI 10.1007/s00253-009-2085-6) or homologs thereof.

[0390] Surprisingly, alcohol dehydrogenase enzymes that are not known to catalyze the reduction of isobutyraldehyde to isobutanol were identified that catalyze this reaction. Thus, in another aspect, such an alcohol dehydrogenase may be encoded by an NADH-dependent 1,3-propanediol dehydrogenase. In yet another aspect, such an alcohol dehydrogenase may be encoded by an NADH-dependent 1,2-propanediol dehydrogenase. Preferred enzymes of this disclosure include enzymes listed in Table 1.

[0391] In another embodiment, a method of producing an alcohol is provided. The method includes providing a recombinant microorganism provided herein; culturing the microorganism of in the presence of a suitable substrate or metabolic intermediate and under conditions suitable for the conversion of the substrate to an alcohol; and detecting the production of the alcohol. In various aspects, the alcohol is selected from 1-propanol, 1-butanol, 2-methyl 1-butanol, 3-methyl 1-butanol, and 2-phenylethanol. In another aspect, the substrate or metabolic intermediate includes a 2-keto acid-derived aldehyde, such as 1-propanal, 1-butanal, 2-methyl-1-butanal, 3-methyl-1-butanal, or phenylethanal.

Recombinant Host Cells Comprising a NADH-Dependent KARI and/or ADH Enzymes

[0392] In an additional aspect, the present invention is directed to recombinant host cells (i.e. metabolically “engineered” or “modified” microorganisms) comprising NADH-dependent KARI and/or ADH enzymes of the invention. Recombinant microorganisms provided herein can express a plurality of additional heterologous and/or native target enzymes involved in pathways for the production of beneficial metabolites such as isobutanol from a suitable carbon source.

[0393] Accordingly, metabolically “engineered” or “modified” microorganisms are produced via the introduction of genetic material (i.e. a NADH-dependent KARI and/or ADH enzymes) into a host or parental microorganism of choice, thereby modifying or altering the cellular physiology and biochemistry of the microorganism. Through the introduction of genetic material and/or the modification of the expression of native genes the parental microorganism acquires new properties, e.g. the ability to produce a new, or greater quantities of, an intracellular metabolite. As described herein, the introduction of genetic material and/or the modification of the expression of native genes into a parental microorganism results in a new or modified ability to produce beneficial metabolites such as isobutanol. The genetic material introduced into and/or the genes modified for expression in the parental microorganism contains gene(s), or parts of genes, coding for one or more of the enzymes involved in a biosynthetic pathway for the production of isobutanol and may also include additional elements for the expression and/or regulation of expression of these genes, e.g. promoter sequences.

[0394] Recombinant microorganisms provided herein may also produce metabolites in quantities not available in the parental microorganism. A “metabolite” refers to any substance produced by metabolism or a substance necessary for or taking part in a particular metabolic process. A metabolite can be an organic compound that is a starting material (e.g., glucose or pyruvate), an intermediate (e.g., 2-ketoisovalerate), or an end product (e.g., 1-propanol, 1-butanol, isobutanol, 2-methyl-1-butanol, 3-methyl-1-butanol) of metabolism. Metabolites can be used to construct more complex molecules, or they can be broken down into simpler ones. Intermediate metabolites may be synthesized from other metabolites, perhaps used to make more complex substances, or broken down into simpler compounds, often with the release of chemical energy.

[0395] Exemplary metabolites include glucose, pyruvate, 1-propanol, 1-butanol, isobutanol, 2-methyl-1-butanol, and 3-methyl-1-butanol.

[0396] The metabolite 1-propanol can be produced by a recombinant microorganism engineered to express or over-express a metabolic pathway that converts pyruvate to 1-propanol. An exemplary metabolic pathway that converts pyruvate to 1-propanol has been described in WO/2008/098227 and by Atsumi et al. (Atsumi et al., 2008, Nature 451(7174): 86-9), the disclosures of which are herein incorporated by reference in their entireties. In a preferred embodiment, metabolic pathway comprises a KARI and/or an ADH enzyme of the present invention.

[0397] The metabolite 1-butanol can be produced by a recombinant microorganism engineered to express or over-express a metabolic pathway that converts pyruvate to 3-methyl-1-butanol. An exemplary metabolic pathway that converts pyruvate to 3-methyl-1-butanol has been described in WO/2008/098227 and by Atsumi et al. (Atsumi et al., 2008, Nature 451(7174): 86-9), the disclosures of which are herein incorporated by reference in their entireties. In a preferred embodiment, metabolic pathway comprises a KARI and/or an ADH enzyme of the present invention.

[0398] The metabolite isobutanol can be produced by a recombinant microorganism engineered to express or over-express a metabolic pathway that converts pyruvate to isobutanol. An exemplary metabolic pathway that converts pyruvate to isobutanol may be comprised of a acetohydroxy acid synthase (ALS) enzyme encoded by, for example, alsS from B. subtilis, a ketolacid reductoisomerase (KARI) of the present invention, a dihydroxy-acid dehydratase (DHAD), encoded by, for example ilvD from E. coli, a 2-keto-acid decarboxylase (KIVD) encoded by, for example kivd from L. lactis, and an alcohol dehydrogenase (ADH) of the present invention.

[0399] The metabolite 3-methyl-1-butanol can be produced by a recombinant microorganism engineered to express or over-express a metabolic pathway that converts pyruvate to 3-methyl-1-butanol. An exemplary metabolic pathway that converts pyruvate to 3-methyl-1-butanol has been described in WO/2008/098227 and by Atsumi et al. (Atsumi et al., 2008, Nature 451(7174): 86-9), the disclosures of which are herein incorporated by reference in their entireties. In a preferred embodiment, metabolic pathway comprises a KARI and/or an ADH enzyme of the present invention.

[0400] The metabolite 2-methyl-1-butanol can be produced by a recombinant microorganism engineered to express or over-express a metabolic pathway that converts pyruvate to 2-methyl-1-butanol. An exemplary metabolic pathway that converts pyruvate to 2-methyl-1-butanol has been described in WO/2008/098227 and by Atsumi et al. (Atsumi et al., 2008, Nature 451(7174): 86-9), the disclosures of which are herein incorporated by reference in their entireties. In a preferred embodiment, metabolic pathway comprises a KARI and/or an ADH enzyme of the present invention.

[0401] The disclosure identifies specific genes useful in the methods, compositions and organisms of the disclosure; however it will be recognized that absolute identity to such genes is not necessary. For example, changes in a particular gene or polynucleotide comprising a sequence encoding a polypeptide or enzyme can be performed and screened for activity. Typically such changes comprise conservative mutation and silent mutations. Such modified or mutated polynucleotides and polypeptides can be screened for expression of a functional enzyme using methods known in the art. In addition, homologs of enzymes useful for generating metabolites are encompassed by the microorganisms and methods provided herein.

### Method of Using Microorganism for Anaerobic Isobutanol Fermentation

[0402] In a method to produce a target compound from a carbon source at high yield a modified microorganism subject to this invention is cultured in an appropriate culture medium containing a carbon source.

[0403] An exemplary embodiment provide a method for producing isobutanol comprising a modified microorganism of the invention in a suitable culture medium containing a carbon source that can be converted to isobutanol by the microorganism of the invention.

[0404] In certain embodiments, the method further includes isolating said target compound from the culture medium. For example, isobutanol may be isolated from the culture medium by any method, in particular a method known to those skilled in the art, such as distillation, pervaporation, or liquid-liquid extraction.

[0405] This invention is further illustrated by the following examples that should not be construed as limiting. The contents of all references, patents, and published patent applications cited throughout this application, as well as the Figures and the Sequence Listing, are incorporated herein by reference for all purposes.

### EXAMPLES

[0406] The following provides examples that demonstrate that microorganisms modified to resolve a cofactor imbalance produce a target compound at higher yield under conditions that include anaerobic conditions. One compound to be produced by the recombinant microorganism according to the present invention is isobutanol. The present invention is not limited to isobutanol. The invention may be applicable to any metabolic pathway that is imbalanced with respect to cofactor usage. One skilled in the art is able identify pathways that are imbalanced with respect to cofactor usage and apply this invention to provide recombinant microorganisms in which the same pathway is balanced with respect to cofactor usage.

### Sample Preparation

[0407] Generally, samples (2 mL) from fermentation experiments performed in shake flasks were stored at 4° C. for later substrate and product analysis. Prior to analysis, samples were centrifuged at 14,000×g for 10 min. The supernatant was filtered through a 0.2 μm filter. Analysis of substrates and products was performed using authentic standards (>99%, obtained from Sigma-Aldrich), and a 5-point calibration curve (with 1-pentanol as an internal standard for analysis by gas chromatography).

### Determination of Optical Density

[0408] The optical density of the yeast cultures was determined at 600 nm using a DU 800 spectrophotometer (Beckman-Coulter, Fullerton, Calif., USA). Samples were diluted as necessary to yield an optical density of between 0.1 and 0.8.

### Gas Chromatography

[0409] Analysis of volatile organic compounds, including ethanol and isobutanol was performed on a HP 5890 gas chromatograph fitted with an HP 7673 Autosampler, a DB-FFAP column (J&W; 30 m length, 0.32 mm ID, 0.25 μM film thickness) or equivalent connected to a flame ionization detector (FID). The temperature program was as follows: 200° C. for the injector, 300° C. for the detector, 100° C. oven for 1 minute, 70° C./minute gradient to 235° C., and then hold for 2.5 min.

[0410] Analysis was performed using authentic standards (>99%, obtained from Sigma-Aldrich), and a 5-point calibration curve with 1-pentanol as the internal standard.

### High Performance Liquid Chromatography

[0411] Analysis of glucose and organic acids was performed on a HP-1100 High Performance Liquid Chromatography system equipped with an Aminex HPX-87H Ion Exclusion column (Bio-Rad, 300×7.8 mm) or equivalent and an H⁺ cation guard column (Bio-Rad) or equivalent. Organic acids were detected using an HP-1100 UV detector (210 nm, 8 nm 360 nm reference) while glucose was detected using an HP-1100 refractive index detector. The column temperature was 60° C. This method was Isocratic with 0.008N sulfuric acid in water as mobile phase. Flow was set at 0.6 mL/min. Injection size was 20 μL and the run time was 30 minutes.

### Molecular Biology and Bacterial Cell Culture

[0412] Standard molecular biology methods for cloning and plasmid construction were generally used, unless otherwise noted (Sambrook, J., Russel, D. W. Molecular Cloning, A Laboratory Manual. 3 ed. 2001, Cold Spring Harbor, N.Y.: Cold Spring Harbor Laboratory Press).

[0413] Standard recombinant DNA and molecular biology techniques used in the Examples are well known in the art and are described by Sambrook, J., Russel, D. W. Molecular Cloning, A Laboratory Manual. 3 ed. 2001, Cold Spring Harbor, N.Y.: Cold Spring Harbor Laboratory Press; and by T. J. Silhavy, M. L. Bennan, and L. W. Enquist, Experiments with Gene Fusions, Cold Spring Harbor Laboratory Press, Cold Spring Harbor, N.Y. (1984) and by Ausubel, F. M. et al., Current Protocols in Molecular Biology, pub. by Greene Publishing Assoc. and Wiley-Interscience (1987).

[0414] General materials and methods suitable for the routine maintenance and growth of bacterial cultures are well known in the art. Techniques suitable for use in the following examples may be found as set out in Manual of Methods for General Bacteriology (Phillipp Gerhardt, R. G. E. Murray, Ralph N. Costilow, Eugene W. Nester, Willis A. Wood, Noel R. Krieg and G. Briggs Phillips, eds.), American Society for Microbiology, Washington, D.C. (1994)) or by Thomas D. Brock in Biotechnology: A Textbook of Industrial Microbiology, Second Edition, Sinauer Associates, Inc., Sunderland, Mass. (1989).

Preparation of Electrocompetent E. coli Cells and Transformation

[0415] The acceptor strain culture was grown in SOB-medium (Sambrook, J., Russel, D. W. Molecular Cloning, A Laboratory Manual. 3 ed. 2001, Cold Spring Harbor, N.Y.: Cold Spring Harbor Laboratory Press) to an OD₆₀₀ of about 0.6 to 0.8. The culture was concentrated 100-fold, washed once with ice cold water and 3 times with ice cold 10% glycerol. The cells were then resuspended in 150 μL of ice-cold 10% glycerol and aliquoted into 50 μL portions. These aliquots were used immediately for standard transformation or stored at −80° C. These cells were transformed with the desired plasmid(s) via electroporation. After electroporation, SOC medium (Sambrook, J., Russel, D. W. Molecular Cloning, A Laboratory Manual. 3 ed. 2001, Cold Spring Harbor, N.Y.: Cold Spring Harbor Laboratory Press) was immediately added to the cells. After incubation for an hour at 37° C. the cells were plated onto LB-plates containing the appropriate antibiotics and incubated overnight at 37° C.

Transformation of S. cerevisiae Cells

[0416] S. cerevisiae strains were transformed by the Lithium Acetate method (Gietz et al., Nucleic Acids Res. 27:69-74 (1992): Cells from 50 mL YPD cultures (YPGaI for valine auxotrophs) were collected by centrifugation (2700 rcf, 2 minutes, 25° C.) once the cultures reached an OD₆₀₀ of 1.0. The cells were washed cells with 50 mL sterile water and collected by centrifugation at 2700 rcf for 2 minutes at 25° C. The cells were washed again with 25 mL sterile water and collected cells by centrifugation at 2700 rcf for 2 minutes at 25° C. The cells were resuspended in 1 mL of 100 mM lithium acetate and transferred to a 1.5 mL eppendorf tube. The cells were collected cells by centrifugation for 20 sec at 18,000 rcf, 25° C. The cells were resuspended cells in a volume of 100 mM lithium acetate that was approximately 4× the volume of the cell pellet. A mixture of DNA (final volume of 15 μl with sterile water), 72 μl 50% PEG, 10 μl 1 M lithium acetate, and 3 μl denatured salmon sperm DNA was prepared for each transformation. In a 1.5 mL tube, 15 μl of the cell suspension was added to the DNA mixture (85 μl), and the transformation suspension was vortexed with 5 short pulses. The transformation was incubated at 30 minutes at 30° C., followed by incubation for 22 minutes at 42° C. The cells were collected by centrifugation for 20 sec at 18,000 rcf, 25° C. The cells were resuspended in 100 μl SOS (1 M sorbitol, 34% (v/v) YP (1% yeast extract, 2% peptone), 6.5 mM CaCl₂) or 100 μl YP (1% yeast extract, 2% peptone) and spread over an appropriate selective plate.

Sporulation of Diploid S. cerevisiae and Germination to Obtain Haploids

[0417] Random spore analysis was used to identify desired haploid segregants of relevant diploid strains. Diploid strains were sporulated by pre-culturing in YPD for 24 hrs and then transferring the cells into 5 mL of sporulation medium (1% wt/vol potassium acetate). After 4-5 days, the culture was examined microscopically for the presence of visible spore-containing asci. To the 5 mL sporulation culture, 0.5 mL of 1 mg/mL Zymolyase-T (Seikagaku Biobusiness, Tokyo, Japan) and 10 μL of β-mercaptoethanol were added, and the cells were incubated overnight at 30° C. while shaking slowly (60 rpm). The next day, 5 mL of 1.5% IGEPAL-CA-630 [reference] were added and the mixture incubated on ice for 15 minutes. The cell suspension was then sonicated (3 rounds, 30 seconds per round, 50% power) with 2 minutes on ice between sonications. The suspension was centrifuged (1200×g, 10 min), the liquid poured off, 5 mL of 1.5% IGEPAL-CA-630 (Sigma-Aldrich Co., St. Louis, Mo.) were added, and the centrifugation and resuspension step repeated once more. The cell suspension was again sonicated as described above, after which it was centrifuged and washed as described above except that instead of IGEPAL, sterile water was used to resuspend the cells. The cells were finally resuspended in 1 mL of sterile water, and 0.1 mL of a 1:10, 1:100, 1:100, and 1:10,000 dilution of the initial 1 mL cell suspension were plated onto SCE-Trp, Leu, Ura (for full-pathway integrants strains) or SCD-Trp, Ura (for partial-pathway integrant strains) media and the plates incubated at 30° C. until colonies appeared (typically, 4-5 days).

### Yeast Colony PCR

[0418] Colony PCR was carried out using the FailSafe mix (Epicentre Biotechnologies, Madison, Wis.). Specifically, 15 L of FailSafe Mix “E” were combined with 13 μL sterile water, 0.35 μL of each primer (from a 100 μM solution), and 0.6 μL FailSafe polymerase. For template, a small dab of yeast cells sufficient to just turn the solution turbid was swirled into each individual reaction mixture. The PCR reactions were incubated as follows: 1 cycle of 94° C.×2 min; 40 cycles of 94° C.×15 sec, 53° C.×15 sec, 72° C.×1 min; 1 cycle of 72° C.×8 min.

qRT-PCR

[0419] Performed by isolating RNA, synthesizing cDNA by reverse transcription and performing qPCR using protocols described below.

### RNA Isolation for Reverse Transcription (RT)

[0420] 3 ml YPD cell cultures were incubated at 30° C., 250 RPM until they reached OD₆₀₀'s of 0.7 to 1.5. 2 OD₆₀₀'s (e.g. 1 mL of a culture at 20D₆₀₀) of cells were then harvested from each culture in 1.5 ml tubes by centrifugation at full speed in a microfuge for 2 minutes. The cell pellet was stored overnight at −20° C. RNA was isolated using the YeaStar RNAKit™ (Zymo Research Corp. Orange, Calif. 92867 USA). Following the protocol provided with the kit, cells were resuspended in 80 μl of YR Digestion Buffer and 5 μl of Zymolyase™. The pellet was completely resuspended by repeated pipetting. The suspension was incubated at 37° C. for 60 minutes. 160 μl of YR Lysis Buffer was added to the suspension, which was then mixed thoroughly by vortexing. The mixture was centrifuged at >4,000×g for 2 minutes in the microfuge, and the supernatant was transferred to a Zymo-Spin Column in a Collection Tube. The column was centrifuged at >10,000×g for 1 minute in the microfuge. To the column, 200 μl RNA Wash Buffer was added, and the column was centrifuged for 1 minute at 14,000 RPM in the microfuge. The flow-through was discarded and 200 μl RNA Wash Buffer was added to the column. The column was centrifuged for 1 minute at >10,000×g. The Zymo-Spin Column was transferred to a new RNase-free 1.5 ml centrifuge tube, and 60 μl of DNase/RNase-Free Water was added directly to the column membrane. The RNA was eluted by centrifugation for 30 seconds at >10,000×g in the microfuge.

cDNA Synthesis (Reverse Transcription) for qPCR

[0421] Using the gScript™ cDNA SuperMix kit provided by Quanta Biosciences™ (Gaithersburg, Md.), cDNA was prepared following the protocol provided with the kit. First, the concentration of RNA was measured for the preparations from each transformant candidate and control strain. A final solution of 300 ng of RNA in sterile water was prepared in a volume of 16 μl in 0.2 ml PCR tube (RNase-free). To each sample, 4 μl of qScript cDNA Supermix was added. The reactions were incubated on a thermocycler for 5 minutes at 25° C., 30 minutes at 42° C., and 5 minutes at 85° C.

qPCR:

[0422] Each reaction contained: 10 μL of PerfeCTa™ SYBR® Green SuperMix kit (Quanta Biosciences™ Gaithersburg, Md.), 1 μl of cDNA, 1 μl of a 5 μM (each) mix of forward and reverse primers and 8 μl of sterile water. Each reaction was assembled in a well of a 0.2 ml 96-well plate, and a clear plastic sheet was carefully (to avoid the introduction of warped surface or fingerprints or smudges) and firmly placed over the 96-well plate. The reactions were incubated in an Eppendorf Mastercycler ep thermocycler (Eppendorf, Hamburg, Germany) using the following conditions: 95° C. for 2 minutes, 40 cycles of 95° C. for 15 seconds and 60° C. for 45 seconds, 95° C. for 15 seconds, 60° C. for 15 seconds, and a 20 minute slow ramping up of the temperature until it reaches 95° C. Finally, it was incubated at 95° for 15 seconds. The fluorescence emitted by the SYBR dye was measured at the 60° C. incubation step during each of the 40 cycles, as well as during the ramping up to 95° C. for melting curve analysis of the primer sets.

Construction of E. coli Strains

[0423] GEVO1385 was constructed by integrating the Z1 module into the chromosome of JCL260 by P1 transduction from the strain E. coli W3110, Z1 (Lutz, R, Bujard, H Nucleic Acids Research (1997) 25, 1203-1210).

[0424] GEVO1399: The gene zwf was deleted according to the standard protocol for gene deletion using the Wanner method (Datsenko, K. and Wanner, B. One-step Inactivation of chromosomal genes in Escherichia coli K-12 using PCR products. PNAS 2000). Primers 73 and 74 were used to amplify the Kan resistance cassette from pKD13. The linear PCR product was transformed into E. coli W3110 pKD46 electro competent cells and the knock-out of zwf was verified by PCR. Lysate of the new strain (E. coli W3110, Δzwf::FRT::Kan::FRT) was prepared and the knock-out was transferred into JCL260 by P1 transduction. Removal of the Kan resistance cassette from this strain using transient expression of FLP recombinase yielded GEVO1399.

[0425] GEVO1608: The gene Ec_yqhD (SEQ ID NO: 68) was deleted according to the standard protocol for gene deletion using the Wanner method (Datsenko, K and Wanner, B, “One-step Inactivation of chromosomal genes in Escherichia coli K-12 using PCR products,” PNAS 2000, 97:6640-6645). Primers 1155 and 1156 were used to amplify the Kan resistance cassette from pKD13. The linear PCR product was transformed into E. coli W3110 pKD46 electro competent cells and the knock-out of Ec_yqhD was verified by PCR. A lysate of the new strain (E. coli W3110, ΔyqhD::FRT::Kan::FRT) was prepared and the knock-out was transferred into JCL260 by P1 transduction yielding GEVO1608.

[0426] GEVO1745: Removal of the Kan resistance cassette from GEVO1608 using transient expression of FLP recombinase yielded GEVO1745.

[0427] GEVO1748 and GEVO1749 are derivatives of JCL260. For the construction of GEVO1748, PLlacO1:LI_kivd1::Ec_ilvD_coEc was integrated into the ilvC locus on the E. coli chromosome. In particular primers 869 and 1030 were used to amplify the kanamycin resistance cassette (Kan) from pKD13, and primers 1031 and 1032 were used to amplify PLlacO1:LI_kivd1::Ec_ilvD_coEc from pGV1655 (SEQ ID NO: 109). For the construction of GEVO1749 PLlacO1:LI_kivd1::Ec_ilvD_coEc was integrated into the adhE locus on the E. coli chromosome. In particular primers 50 and 1030 were used to amplify the kanamycin resistance cassette from pKD13, and primers 1031 and 1205 were used to amplify PLlacO1:LI_kivd1::Ec_ilvD_coEc from pGV1655 (SEQ ID NO: 109). Afterwards, SOE (splicing by overlap extension) (Horton, R M, Cai, Z L, Ho, S N, et al. Biotechniques Vol. 8 (1990) pp 528) reactions were done to connect the gene expression cassettes to the resistance cassette using primers 1032 and 869 for the ilvC locus and primers 1205 and 50 for the adhE locus. The linear PCR products were transformed into W3110 pKD46 electro competent cells and the knock ins of PLlacO1:LI_kivd1::Ec_ilvD_coEc::FRT::Kan::FRT were verified by PCR. The knock ins were further verified by sequencing. Lysates of the new strains E. coli W3110, ΔilvC::PLlacO1:LI_kivd1::Ec_ilvD_coEc::FRT::Kan::FRT) and E. coli W3110, ΔadhE::PLlacO1:LI_kivd1:: Ec_ilvD_coEc::FRT::Kan::FRT) were prepared and the knock ins were transferred to JCL260 by P1 transduction. Removal of the Kan resistance cassette from this strain using expression of FLP recombinase yielded GEVO1748 and GEVO1749.

[0428] GEVO1725, GEVO1750, GEVO1751: The gene maeA was deleted according to the standard protocol for gene deletion using the Wanner method (Datsenko, K. and Wanner, B. One-step Inactivation of chromosomal genes in Escherichia coli K-12 using PCR products. PNAS 2000). Primers 116 and 117 were used to amplify the Kan resistance cassette from pKD13. The linear PCR product was transformed into E. coli W3110 pKD46 electro competent cells and the knock-out of maeA was verified by PCR. Lysate of the new strain (E. coli W3110, ΔmaeA::FRT::Kan::FRT) was prepared and the knock-out was transferred into JCL260 by P1 transduction. The Kan resistance cassette was removed from this strain using transient expression of FLP recombinase. The resulting strain was transduced with the Z1 cassette yielding GEVO1750, and the same strain was transduced with a lysate conferring a pykA deletion. The pykA deletion lysate was prepared from W3110, ΔpykA::FRT::Kan::FRT, which was created using homologous recombination according to the Wanner method using primers 1187 and 1188 for the amplification of the Kan cassette from pKD13. The Kan resistance cassette was removed from this strain using transient expression of FLP recombinase. The resulting strain was transduced with a lysate conferring a pykF deletion. The pykF deletion lysate was prepared from W3110, ΔpykF::FRT::Kan::FRT, which was created using homologous recombination according to the Wanner method using primers 1191 and 1192 for the amplification of the Kan cassette from pKD13. Removal of the Kan resistance cassette from this strain using transient expression of FLP recombinase yielded GEVO1725. For the construction of GEVO1751 strain GEVO1725 was transduced with a lysate of W3110Z1. The resulting strain was GEVO1751.

[0429] For the construction of GEVO1777 ilvC was deleted according to the standard protocol for gene deletion using the Wanner method. Primers 868 and 869 were used to amplify the Kan resistance cassette from pKD13. The linear PCR product was transformed into E. coli W3110 pKD46 electro competent cells and the knock-out of ilvC was verified by PCR. The Kan resistance cassette was removed from this strain using transient expression of FLP recombinase. The resulting strain was transduced with the Z1 cassette yielding GEVO1777.

[0430] GEVO1780 was constructed by transforming JCL260 with plasmids pGV1655 (SEQ ID NO: 109) and pGV1698 (SEQ ID NO: 112).

[0431] GEVO1844: An E. coli sthA deletion strain was obtained from the Keio collection and the deletion of sthA was verified. The sthA deletion was transferred to GEVO1748 by P1 phage transduction and after removal of the Kan resistance cassette by transient expression of FLP recombinase the resulting strain GEVO1844 was verified for the sthA deletion.

[0432] GEVO1846 was constructed by transforming strain GEVO1748 with plasmids pGV1745 (SEQ ID NO: 117) and pGV1698 (SEQ ID NO: 112).

[0433] GEVO1859 was constructed according to the standard protocol for gene integration using the Wanner method (Datsenko, K. and Wanner, B. One-step Inactivation of chromosomal genes in Escherichia coli K-12 using PCR products. PNAS 2000). Primers 1219 and 1485 were used to amplify PLlacO1::Bs_alsS1::Ec_ilvC_coEc from pGV1698 (SEQ ID NO: 112). Primers 1218 and 1486 were used to amplify the Kan resistance cassette from pKD13. SOE (splicing by overlap extension) was used to combine the two pieces to one integration cassette. The linear PCR product was transformed into E. coli W3110 pKD46 electro competent cells and the knock-in of PLlacO1::Bs_alsS1::Ec_ilvC_coEc::FRT::Kan::FRT into the pflB locus was verified by PCR. The knock-in was further verified by sequencing. Lysate of the new strain (E. coli W3110, ΔpflB:: PLlacO1::Bs_alsS1::Ec_ilvC_coEc::FRT::Kan::FRT) was prepared and the knock-in was transferred into GEVO1749 by P1 transduction. Removal of the Kan resistance cassette from this strain using transient expression of FLP recombinase yielded GEVO1859.

[0434] GEVO1886 was constructed according to the standard protocol for gene integration using the Wanner method (Datsenko, K. and Wanner, B. One-step Inactivation of chromosomal genes in Escherichia coli K-12 using PCR products. PNAS 2000). Primers 1562 and 1539 were used to amplify PLlacO1::pntAB from pGV1745 (SEQ ID NO: 117). Primers 1479 and 1561 were used to amplify the Kan resistance cassette from pKD13. SOE was used to combine the two pieces to one integration cassette. The linear PCR product was transformed into E. coli W3110 pKD46 electro competent cells and the knock-in of PLlacO1::pntAB::FRT::Kan::FRT into the sthA locus was verified by PCR. The knock-in was further verified by sequencing. Lysate of the new strain (E. coli W3110, ΔsthA:: PLlacO1::pntAB::FRT::Kan::FRT) was prepared and the knock-in was transferred into GEVO1859 by P1 transduction. Removal of the Kan resistance cassette from this strain using transient expression of FLP recombinase yielded GEVO1886.

[0435] GEVO1993 is a derivative of GEVO1748. For the construction of GEVO1993, PLlacO1::Bs_alsS1 was integrated into the pta locus on the E. coli chromosome. In particular primers 1526 and 474 were used to amplify the kanamycin resistance cassette (Kan) from pKD13, and primers 1563 and 1527 were used to amplify PLlacO1::Bs_alsS1 from pGV1698. Afterwards, SOE (splicing by overlap extension) reactions were done to connect the gene expression cassette to the resistance cassette using primers 1563 and 474. The linear PCR products were transformed into E. coli W3110 pKD46 electro competent cells and the knock-ins of PLlacO1::Bs_alsS1::FRT::Kan::FRT were verified by PCR. The knock-ins were further verified by sequencing. Lysate of the new strain E. coli W3110, Δpta::PLlacO1::Bs_alsS1::FRT::Kan::FRT was prepared and the knock-in was transferred to GEVO1748 by P1 transduction yielding GEVO1993. The integration into the pta locus in GEVO1993 was verified by PCR.

Construction of Saccharomyces cerevisiae Strains

[0436] A PDC deletion variant S. cerevisiae, GEVO2302, was evolved so that it does not have the requirement for a two-carbon molecule and has a growth rate similar to the parental strain on glucose.

[0437] GEVO1186 is S. cerevisiae CEN.PK2

[0438] GEVO1803 was made by transforming GEVO1186 with the 6.7 kb pGV1730 (SEQ ID NO: 116) (contains S. cerevisiae TRP1 marker and the CUP1 promoter-driven Bs_alsS2) that had been linearized by digestion with NruI. Completion of the digest was confirmed by running a small sample on a gel. The digested DNA was then purified using Zymo Research DNA Clean and Concentrator and used in the transformation. Trp+ clones were confirmed for the correct integration into the PDC1 locus by colony PCR using primer pairs 1440+1441 and 1442+1443 for the 5′ and 3′ junctions, respectively. Expression of Bs_alsS2 was confirmed by qRT-PCR using primer pairs 1323+1324.

[0439] GEVO2107 was made by transforming GEVO1803 with linearized, Hpal-digested pGV1914 (SEQ ID NO: 119). Correct integration of pGV1914 at the PDC6 locus was confirmed by analyzing candidate Ura+ colonies by colony PCR using primers 1440 plus 1441, or 1443 plus 1633, to detect the 5′ and 3′ junctions of the integrated construct, respectively. Expression of all transgenes were confirmed by qRT-PCR using primer pairs 1321 plus 1322, 1587 plus 1588, and 1633 plus 1634 to examine Bs_alsS2, LI_kivd2_coEc, and Dm_ADH transcript levels, respectively.

[0440] GEVO2158 was made by transforming GEVO2107 with NruI-digested pGV1936 (SEQ ID NO: 120). Correct integration of pGV1936 at the PDC5 locus was confirmed by analyzing candidate Ura+, Leu+ colonies by colony PCR using primers primers 1436 plus 1437, or 1595 plus 1439, to detect the 5′ and 3′ junctions of the integrated construct, respectively. Expression of all transgenes were confirmed by qRT-PCR using primer pairs 1321 plus 1322, 1597 plus 1598, 1566 plus 1567, 1587 plus 1588, 1633 plus 1634, and 1341 plus 1342 to examine levels of Bs_alsS2, Ec_ilvC_coSc^{Q110V}, Sc_ilv3ΔN, LI_kivd2_coEc, Dm_ADH, and ACT1, respectively.

[0441] GEVO2302 was constructed by sporulating GEVO2158. Haploid spores were prepared for random spores analysis (as described above), and the spores were plated onto SCE-Trp,Leu,Ura medium (14 g/L Sigma™ Synthetic propout Media supplement (includes amino acids and nutrients excluding histidine, tryptophan, uracil, and leucine), 6.7 g/L Difco™ Yeast Nitrogen Base without amino acids. 0.076 g/L histidine and 25 mL/L 100% ethanol). Candidate colonies were patched onto SCE-Trp, Leu, Ura plates (Plate version of the above medium was prepared using 20 g/L agar) and then replica plated onto YPD (10 g/L yeast extract, 20 g/L peptone, 20 g/L glucose) and YPE (10 g/L yeast extract, 20 g/L peptone, 25 mL/L 100% ethanol) plates. Patches that grew on YPE but failed to grow on YPD were further analyzed by colony PCR to confirm mating type (and, hence, their status as haploid). Several verified haploid candidates were further analyzed for transgene expression by qRT-PCR. GEVO2302 contains the full isobutanol pathway with ALS, KARI, DHAD, KIVD, and ADH being encoded by Bs_alsS2, Ec_ilvC_coSc^{Q110V}, Sc_ilv3ΔN, LI_kivd2_coEc, Dm_ADH, respectively.

[0442] GEVO2710, GEVO2711, GEVO2712 and GEVO2799 are C2-independent, glucose de-repressed derivatives of GEVO2302, which were constructed via chemostat evolution: A DasGip fermentor vessel was sterilized and filled with 1 L of YNB+histidine medium (Yeast Nitrogen Base+histidine, containing per liter of distilled water: 6.7 g YNB without amino acids from Difco and 0.076 g histidine; the medium was adjusted to pH 5 by adding a few drops of HCL or KOH) and contained 2% w/v ethanol. The vessel was installed and all probes were calibrated according to DasGip instructions. The vessel was also attached to an off-gas analyzer of the DasGip system, as well as to a mass spectrometer. Online measurements of oxygen, carbon dioxide, isobutanol, and ethanol were taken throughout the experiment. The two probes that were inside the vessel measured pH and dissolved oxygen levels at all times. A medium inlet and an outlet were also set up on the vessel. The outlet tube was placed at a height just above the 1 L level, and the pump rate was set to maximum. This arrangement helped maintain the volume in the vessel at 1 L. Air was sparged into the fermentor at 12 standard liters per hour (slph) at all times. The temperature of the vessel was held constant at 30.0° C. and the agitation rate was set at a minimum of 500 rpm, with a cascade control to adjust the agitation to maintain 50% dissolved oxygen in the culture. The off-gas was analyzed for CO₂, O₂, ethanol and isobutanol concentrations. The amount of carbon dioxide (X_{CO2}) and oxygen (X_{O2}) levels in the off-gas were used to assess the metabolic state of the cells. An increase in X_{CO2} levels and decrease in X_{O2} levels indicated an increase in growth rate and glucose consumption rate. The ethanol levels were monitored to ensure that there was no contamination, either from other yeast cells or from potential revertants of the mutant strain because the S. cerevisiae PDC triple-mutant (GEVO2302) does not produce ethanol. The minimum pH in the vessel was set to 5, and a base control was set up to pump in potassium hydroxide into the vessel when the pH dropped below 5.

[0443] GEVO2302 was inoculated into 10 ml of YNB+histidine medium with 2% w/v ethanol as the carbon source. The culture was incubated at 30° C. overnight with shaking. The overnight culture was used to inoculate the DasGip vessel. Initially, the vessel was run in batch mode, to build up a high cell density. When about a cell biomass of OD₆₀₀=8 was reached, the vessel was switched to chemostat mode and the dilution of the culture began. The medium pumped into the vessel was YNB+histidine with 6.357 g/L glucose and 0.364 g/L of acetate (5% carbon equivalent). The initial dilution rate was set to 0.06 h⁻¹ to avoid washout.

[0444] After the culture in the chemostat was stabilized at the 0.06 h⁻¹ dilution rate, the concentration of acetate was slowly decreased. This was achieved by using a two pump system, effectively producing a gradient pumping scheme. Initially pump A was pumping YNB+histidine medium with 10 g/L glucose at a rate of 35.5 mL/h and pump B was pumping YNB+histidine medium with only 1 g/L acetate at a rate of 20.3 mL/h. The total acetate going into the vessel was 0.364 g/L. Then, over a period of 5 days, the rate of pump B was slowly decreased and the rate of pump A was increased so that the combined rate of feeding increased from 56 mL/h to 74 ml/h. Over this period, the rate of pump B was finally reduced to 0, resulting in no (0 g/L) acetate addition to the chemostat. The glucose feed to the chemostat over this period was increased from 6.4 g/L to 10 g/L and the evolved strain was able to grow on glucose only.

[0445] Evolution of the strain for growth on increased glucose concentration was performed by slowly increasing the concentration of glucose in the chemostat with the evolved strain that no longer required a 2-carbon supplement. The concentration of glucose in the feed medium was increased from 10 g/L to 38 g/L over a period of 31 days. This was achieved by using a two pump system, effectively producing a gradient pumping scheme. Initially pump A was pumping YNB+histidine medium with 10 g/L glucose at a rate of 35.2 mL/h and pump B was pumping YNB+histidine medium with 15 g/L glucose at a rate of 32.9 mL/h. The total glucose going into the vessel was 12.4 g/L. Then, over a period of 18 days, the medium reservoirs for pump A and pump B were replaced with reservoirs containing increased concentrations of glucose until the reservoir for pump A contained 80 g/L glucose and the reservoir for pump B contained 100 g/L glucose. During this period, the combined rate of feeding maintained a dilution rate of 0.04 h⁻¹. At the end of this period, the rate of pump A was finally reduced to 0, resulting in a feed of 100 g/L glucose. This dilution rate resulted in a biomass of OD₆₀₀=4.8 at this glucose concentration and increasing the dilution rate to 0.09 h⁻¹ over a period of 4 days lowered the biomass to an OD₆₀₀=2.6. The dilution rate was lowered to 0.03 h⁻¹ and gradually raised to 0.04 h⁻¹ at 100 g/L glucose feed to raise the biomass to an OD₆₀₀=4.4 over a period of 5 days. The glucose feed was then lowered by replacing the medium reservoir for pump A with a reservoir containing 0 g/L glucose, pumping initially at a rate of 33.4 ml/h, and pumping the 100 g/L glucose feed from pump B at 2.4 ml/h. This resulted in a dilution rate of 0.04 h⁻¹, a glucose feed of 6.7 g/L and a biomass of OD₆₀₀=6.0. Over a period of 4 days, the glucose concentration in the feed was gradually increased to 37.8 g/L by increasing the rate of pump B and decreasing the rate of pump A while maintaining a dilution rate of 0.04 h⁻¹ and resulting in a biomass under these conditions of an OD₆₀₀=6.6 and a glucose level in the chemostat of 18.8 g/L.

[0446] Evolution of the strain for increased growth rate was performed by slowly increasing the dilution rate in the chemostat with the evolved strain that no longer required a 2-carbon supplement and could grow with a feed of 37.8 g/L glucose with a glucose level in the chemostat of 18.8 g/L. Over a period of 13 days, the dilution rate was gradually increased from 0.04 h⁻¹ to 0.14 h⁻¹ by alternately increasing the rates of pump A and pump B to maintain a glucose feed concentration of 21-24 g/L glucose. A biomass of OD₆₀₀=1.6 to an OD₆₀₀=2.0 was maintained at dilution rates of 0.13 h⁻¹ to 0.14 h⁻¹.

[0447] Over the period of evolution, a sample was occasionally removed from the vessel directly. Samples were analyzed for glucose, acetate, and pyruvate using HPLC. Samples were plated onto YNB+histidine medium with 2% w/v ethanol as carbon source, YNB+histidine medium with different glucose concentrations (5 g/L, 10 g/L, 15 g/L, 20 g/L, 25 g/L and 50 g/L glucose), and YPD medium (containing 10 g/L yeast extract, 20 g/L peptone and 20 g/L dextrose) agar plates (plates contain the indicated medium+20 g/L agar). OD₆₀₀ measurements were taken regularly to make sure the chemostat did not wash out. Freezer stocks of samples of the culture were made regularly for future characterization of the strains.

[0448] The chemostat with the evolved strain that no longer required a 2-carbon supplement and could grow with a feed of 37.8 g/L glucose with a glucose level in the chemostat of 18.8 g/L and could grow at a dilution rate>0.13 h⁻¹ was maintained for another 23 days with varying dilution rates from 0.07 h⁻¹ to 0.11 h⁻¹ to allow further evolution for improved growth rate. At the end of this period, a sample from the chemostat was plated onto YNB+histidine medium with 50 g/L glucose agar plates and allowed to form colonies at 30° C. Ten colonies were picked for further characterization and re-streaked onto YNB+histidine medium with 50 g/L glucose agar plates for purification. None of these 10 evolved strains isolated from the chemostat sample grew when streaked onto SC-histidine medium (Synthetic complete medium lacking histidine, containing per liter of distilled water: 6.7 g YNB without amino acids from Difco, 100 ml of a solution of 14 g Yeast Synthetic prop-out Medium Supplements without histidine, leucine, tryptophan and uracil from Sigma dissolved in 1 L water, 20 ml of a solution of 3.8 g/L tryptophan, 20 ml of a solution of 19 g/L leucine and 40 ml of a solution of 1.9 g/L uracil) containing 20 g/L glucose plates but did grow on SC-leucine medium (Synthetic complete medium lacking leucine, containing per liter of distilled water: 6.7 g YNB without amino acids from Difco, 100 ml of a solution of 14 g Yeast Synthetic prop-out Medium Supplements without histidine, leucine, tryptophan and uracil from Sigma dissolved in 1 L water, 20 ml of a solution of 3.8 g/L tryptophan, 20 ml of a solution of 3.8 g/L histidine and 40 ml of a solution of 1.9 g/L uracil) containing 20 g/L glucose plates, indicating that they were still auxotrophic for histidine.

[0449] To characterize growth of the evolved strains, single colonies from each of the 10 evolved isolates purified on YNB+histidine medium with 50 g/L glucose agar plates were inoculated into 3 ml of YNB+histidine medium with 50 g/L glucose and YPD medium in 14 ml round-bottom snap-cap tubes and incubated overnight at 30° C. as a pre-culture. The next day the pre-cultures were used to inoculate 5 ml of the same medium as the pre-cultures in 50 ml conical plastic screw-cap centrifuge tubes to an OD₆₀₀ of 0.01. The cultures were incubated shaking upright at 250 rpm at 30° C. and sampled periodically for OD₆₀₀ measurement. Growth rates were calculated from plots of the OD₆₀₀ measurements vs. time of incubation. Evolved isolates GEVO2710, GEVO2711, GEVO2712 and GEVO2799 were selected because of high growth rates in both YNB+histidine medium with 50 g/L glucose and YPD medium.

[0450] GEVO2792 is a C2-independent, PDC-minus S. cerevisiae strain carrying a control plasmid encoding no genes for an isobutanol metabolic pathway. To generate this strain, GEVO2710 was transformed with plasmid pGV2020 (SEQ ID NO: 121).

[0451] GEVO2844 is a C2-independent, PDC-minus S. cerevisiae strain carrying a control plasmid encoding no genes for an isobutanol metabolic pathway. To generate this strain, GEVO2799 was transformed with plasmid pGV2020 (SEQ ID NO: 121).

[0452] GEVO2847 is a C2-independent, PDC-minus S. cerevisiae strain carrying a partially NADH-utilizing isobutanol metabolic pathway. To generate this strain, GEVO2799 was transformed with plasmid pGV2082 (SEQ ID NO: 122), carrying the genes encoding NADPH-dependent KARI and the NADH-dependent ADH, Ec_ilvC_coSc^{Q110V}(SEQ ID NO: 24), and Dm_ADH (SEQ ID NO: 60), respectively.

[0453] GEVO2848 is a C2-independent, PDC-minus S. cerevisiae strain carrying a partially NADH-utilizing isobutanol metabolic pathway. To generate this strain, GEVO2799 was transformed with plasmid pGV2227 (SEQ ID NO: 123), carrying the genes encoding NADPH-dependent KARI and the NADH-dependent ADH, Ec_ilvC_coSc^{Q110V} (SEQ ID NO: 24), and LI_adhA (SEQ ID NO: 66), respectively.

[0454] GEVO2849 is a C2-independent, PDC-minus S. cerevisiae strain carrying an NADH-utilizing isobutanol metabolic pathway. To generate this strain, GEVO2799 was transformed with plasmid pGV2242 (SEQ ID NO: 125), carrying the genes encoding NADH-dependent KARI and ADH, Ec_ilvC_coSc^{P2D1} (SEQ ID NO: 39) and LI_adhA (SEQ ID NO: 66), respectively.

[0455] GEVO2851 is a C2-independent, PDC-minus S. cerevisiae strain carrying a partially NADH-utilizing isobutanol metabolic pathway. To generate this strain, GEVO2711 was transformed with plasmid pGV2227 (SEQ ID NO: 123), carrying the genes encoding NADPH-dependent KARI and the NADH-dependent ADH, Ec_ilvC_coSc^{Q110V} (SEQ ID NO: 24), and LI_adhA (SEQ ID NO: 66), respectively.

[0456] GEVO2852 is a C2-independent, PDC-minus S. cerevisiae strain carrying an NADH-utilizing isobutanol metabolic pathway. To generate this strain, GEVO2711 was transformed with plasmid pGV2242 (SEQ ID NO: 125), carrying the genes encoding NADH-dependent KARI and ADH, Ec_ilvC_coSc^{P2D1} (SEQ ID NO: 39) and LI_adhA (SEQ ID NO: 66), respectively.

[0457] GEVO2854 is a C2-independent, PDC-minus S. cerevisiae strain carrying a partially NADH-utilizing isobutanol metabolic pathway. To generate this strain, GEVO2710 was transformed with plasmid pGV2082 (SEQ ID NO: 122), carrying the genes encoding NADPH-dependent KARI and the NADH-dependent ADH, Ec_ilvC_coSc^{Q110V}, and Dm_ADH (SEQ ID NO: 60), respectively.

[0458] GEVO2855 is a C2-independent, PDC-minus S. cerevisiae strain carrying a partially NADH-utilizing isobutanol metabolic pathway. To generate this strain, GEVO2710 was transformed with plasmid pGV2227 (SEQ ID NO: 123), carrying the genes encoding NADPH-dependent KARI and the NADH-dependent ADH Ec_ilvC_coSc^{Q110V}, and LI_adhA (SEQ ID NO: 66), respectively.

[0459] GEVO2856 is a C2-independent, PDC-minus S. cerevisiae strain carrying an NADH-utilizing isobutanol metabolic pathway. To generate this strain, GEVO2710 was transformed with plasmid pGV2242 (SEQ ID NO: 125), carrying the genes encoding NADH-dependent KARI and ADH, Ec_ilvC_coSc^{P2D1} (SEQ ID NO: 39) and LI_adhA (SEQ ID NO: 66), respectively.

Construction of E. coli Expression Plasmids

[0460] pGV1631: The adh2 gene was cut out of plasmid pSA55 using appropriate restriction enzymes. Re-ligation yielded plasmid pGV1631 featuring only LI_kivd1 (SEQ ID NO: 45) under the control of the PLlacOI promoter. The plasmid was verified by sequencing prior to its use.

[0461] pGV1705A: The Ec_yqhD gene (SEQ ID NO: 68) contained on plasmid pGV1705 was cloned into plasmid pGV1711 (SEQ ID NO: 113) using the primers XX3 and XX4. These primers added additional sequences surrounding the ADH coding sequence. Specifically, the 5′-end of the PCR product contains an EcoRI site, a BamHI site, a RBS (aggaga), a 7 nucleotide space sequence, and the initiating ATG codon. The 3′ end of the product, following the stop codon, contains a NotI site followed by an AvrII site. The amplified product was digested with EcoRI and NotI and ligated into pGV1711 (SEQ ID NO: 113) which had been cut with both EcoRI and AvrII and gel purified to generate plasmid pGV1705-A,

[0462] ADH genes, whether PCR amplified or ordered as synthetic DNA sequences were cloned into plasmid pGV1716 (SEQ ID NO: 114), a derivative of plasmid pGV1698 carrying an in vitro-synthesized gene for S. cerevisiae ADH2, codon-optimized for expression in E. coli (=“ADH2co”). ADH2co gene was amplified from plasmid pGV1527 in a PCR reaction using KOD polymerase (Novagen, Gibbstown, N.J.) and primers 1296 and 1297. These primers add additional sequences surrounding the ADH2co coding sequence. Specifically, the 5′-end of the PCR product contains a SalI site, a BamHI site, an RBS (aggaga), a 7 nucleotide space sequence, and the initiating ATG codon. The 3′ end of the product, following the stop codon, contains a NotI site followed by a SalI site. The amplified product was digested SalI and was ligated into pGV1698 (SEQ ID NO: 112) which had been cut with SalI and gel purified. DNA constructs were analyzed by multiple restriction digests, and also by DNA sequencing to confirm integrity and to correct construction. Oligonucleotides 1220 and 1365 were used as primers in standard DNA sequencing reactions to sequence all of the aforementioned clones.

[0463] Plasmid pGV1748, which contains the ORF for Ec_fucO (SEQ ID NO: 64) expressed under the control of the IPTG-inducible promoter PLlacO1, was generated by amplifying the Ec_fucO gene in a PCR reaction, using primers 1470 and 1471 and E. coli genomic DNA as a template. The ˜1.2 kb PCR product so generated was digested with BamHI plus NotI, purified using a Zymo Research DNA Gel Extraction kit (Zymo Research, Orange, Calif.) according to manufacturer's protocol, and ligated into the vector pGV1716 (SEQ ID NO: 114) which had been digested with BamHI plus NotI and purified using a Zymo Research DNA Gel Extraction kit (Zymo Research, Orange, Calif.).

[0464] Plasmid pGV1748-A: The Ec_fucO gene contained on plasmid pGV1748 was cloned into plasmid pGV1711 (SEQ ID NO: 113) using the primers XX1 and XX2. These primers add additional sequences into the vector backbone upstream of the AvrII restriction site and downstream of the EcoRI restriction site. Specifically, the 5′-end of the PCR product contains a NotI site followed by an AvrII site and the 3′ end of the product, contains an AgeI site followed by an EcoRI site. The amplified product was digested with AgeI and NotI and ligated with the similarly digested pGV1711 to generate plasmid 1748-A.

[0465] Plasmid pGV1749, which contains the ORF for Dm_ADH (SEQ ID NO: 60) expressed under the control of the IPTG-inducible promoter PLlacO1, was generated by amplifying the Dm_ADH gene in a PCR reaction, using primers 1469 and 1364 and the clone RH54514 (Drosophila Genome Resource Center) as a template. The ˜0.8 kb PCR product was digested with BglII plus NotI, was purified using a Zymo Research DNA Gel Extraction kit according to manufacturer's protocol, and was ligated into the vector pGV1716 (SEQ ID NO: 114) which had been digested with BamHI plus NotI and purified using a Zymo Research DNA Gel Extraction kit.

[0466] Plasmid pGV1749-A: The Dm_ADH gene (SEQ ID NO: 60) contained on plasmid pGV1749 was cloned into plasmid pGV1711 (SEQ ID NO: 113) using the primers XX1 and XX2. These primers add additional sequences into the vector backbone 5′ of the AvrII restriction site and 3′ of the EcoRI restriction site. Specifically, the 5′-end of the PCR product contains a NotI site followed by an AvrII site and the 3′ end of the product, contains an AgeI site followed by an EcorI site. The amplified product was digested with AgeI and NotI and ligated with the product of the ADH gene similarly digested with AgeI and NotI to generate plasmid pGV1749-A.

[0467] Plasmid pGV1778, which contains the ORF for Kp_dhaT (SEQ ID NO: 62) expressed under the control of the IPTG-inducible promoter PLlacO1, was generated by excising the Kp_dhaT gene from an in vitro synthesized plasmid (generated by DNA2.0, Menlo Park, Calif.) by digestion with BamHI plus NotI. The released 1.16 kb fragment was purified using a Zymo Research DNA Gel Extraction kit according to manufacturer's protocol, and was ligated into the vector pGV1716 (SEQ ID NO: 114) which had been digested with BamHI plus NotI and purified using a Zymo Research DNA Gel Extraction kit.

[0468] Plasmid pGV1778-A: The Kp_dhaT gene (SEQ ID NO: 62) contained on plasmid pGV1778 was cloned into plasmid pGV1711 (SEQ ID NO: 113) using the primers XX1 and XX2. These primers add additional sequences into the vector backbone 5′ of the AvrII restriction site and 3′ of the EcoRI restriction site. Specifically, the 5′-end of the PCR product contains a NotI site followed by an AvrII site and the 3′ end of the product, contains an Agel site followed by an EcoRI site. The amplified product was digested with AgeI and NotI and ligated with the product of the ADH gene similarly digested with AgeI and NotI to generate plasmid pGV1778-A.

[0469] Plasmids pGV1655 (SEQ ID NO: 109) and pGV1711 (SEQ ID NO: 113) have been described previously. Briefly, pGV1655 is a low-copy, Kan^{R}-selected plasmid that expresses E. coli Ec_ilvD_coEc (SEQ ID NO: 51) and LI_kivd1 (SEQ ID NO: 41) under the control of the PLlac promoter.

[0470] Plasmid pGV1938 was constructed by inserting the gene coding for Ec_IlvC_coEc^{S78D} into pGV1711 (SEQ ID NO: 113). The KARI variant gene was amplified with primers Not_in_for and AvrII_in_rev introducing the 5′ NotI and the 3′ AvrII restriction sites, DpnI digested for 1 h at 37° C., and then cleaned up using the Zymo PCR clean up kit. The fragment and the vector pGV1711 were restriction digested with NotI and AvrII and run out on a 1% agarose gel. After cutting out the fragments, they were cleaned up using the Freeze'n'Squeeze and pellet paint procedure. Ligation was performed with the rapid ligation kit from Roche according to the manufacturer's instructions.

[0471] Plasmid pGV1939 was generated using primers XX3 and XX4 to amplify the Ec_fucO gene from plasmid pGV1748-A. The forward primer adds a new RBS (aggaga), a 7 nucleotide space sequence, and the initiating ATG codon. The amplified product was digested with EcoRI and NotI and ligated with the similarly digested pGV1711 (SEQ ID NO: 113) to generate plasmid pGV1939 containing the modified RBS.

[0472] The genes coding for KARI variants Ec_ilvC_coEc^{his6} (SEQ ID NO: 14), Ec_ilvC_coEc^{S78D-his6} (SEQ ID NO: 16), Ec_ilvC_coEc^{6E6-his6} (SEQ ID NO: 32) and Ec_ilvC_coEc^{2H10-his6} (SEQ ID NO: 30) were cloned into pGV1939 generating plasmids pGV1925, pGV1927, pGV1975 and pGV1976, respectively using primers NotI_in_for and AvrII_in_rev. The PCR products were DpnI digested for 1 h and cleaned over a 1% agarose gel. After a sequential restriction digestion of vector and insert with NotI for 1 h followed by 1 h with AvrII, ligation was performed using rapid ligase (Roche). Ligation mixture was desalted using the Zymo PCR clean up kit and used to transform E. coli DH5α. DNA constructs were analyzed by restriction digests, and also by DNA sequencing to confirm integrity and correct construction. Primers pETup and KARIpETrev were used as primers in standard DNA sequencing reactions to sequence pET22b(+) derivatives, primer seq_ilvc_pGV was used to sequence pGV1925, pGV1927, pGV1975 and pGV1976.

Construction of Saccharomyces cerevisiae Expression Plasmids

[0473] pGV1824: The gene coding for Ec_IlvC (SEQ ID NO: 13) was codon optimized for S. cerevisiae and synthesized (DNA2.0, Menlo Park, Calif.), resulting in Ec_ilvC_coSc (SEQ ID NO: 12). To generate pGV1824, the Ec_ilvC_coSc gene was excised from plasmid pGV1774 using BglII and XhoI. Plasmid pGV1662 was digested with SalI and BamHI. The pGV1662 vector backbone and Ec_ilvC_coSc insert were ligated using standard methods resulting in plasmid pGV1824 containing the gene Ec_ilvC_coSc.

[0474] pGV1914 (SEQ ID NO: 119) is a yeast integrating vector (YIp) that utilizes the S. cerevisiae URA3 gene as a selection marker and contains homologous sequence for targeting the HpaI-digested, linearized plasmid for integration at the PDC6 locus of S. cerevisiae. This plasmid does not carry a yeast replication origin, thus is unable to replicate episomally. This plasmid carries the Dm_ADH (SEQ ID NO: 60) and LI_kivd2_coEc (SEQ ID NO: 48) genes, expressed under the control of the S. cerevisiae TDH3 and TEF1 promoters, respectively. pGV1914 was generated in two steps. First, the Dm_ADH-containing E. coli expression plasmid pGV1749 was digested with SalI plus NotI, and the 0.78 kb fragment containing the Dm_ADH ORF released by digestion was gel purified and ligated into pGV1635, which had been digested with XhoI plus NotI and gel purified. Plasmid pGV1635 is a yeast expression plasmid which has as its salient feature a TDH3 promoter followed by several restriction enzyme recognition sites, into which the Dm_ADH sequence was cloned as described above. A correct recombinant plasmid was named pGV1913. In the second step of pGV1914 construction, pGV1913 was digested with BamHI plus NotI and the 1.45 kb fragment, containing the TDH3 promoter-Dm_ADH ORF sequence was gel purified and ligated into pGV1733, which had been digested with BamHI plus NotI and similarly gel purified, yielding pGV1914. Thus, the ScADH7 ORF in pGV1733 is replaced by the Dm_ADH ORF in the pGV1914, both under the control of the TDH3 promoter; both plasmids also contain the P_{TEF1}-LI_kivd2_coEc cassette as well as the URA3 selection marker and ScPDC6 5′ and 3′ regions suitable for homologous recombination targeting following linearization of the plasmid with HpaI.

[0475] pGV1936 (SEQ ID NO: 120) is a yeast integrating vector (YIp) that utilizes the S. cerevisiae LEU2 gene as a selection marker and contains homologous sequence for targeting the linearized (by HpaI digestion) plasmid for integration at the PDC5 locus of S. cerevisiae. This plasmid does not carry a yeast replication origin, thus is unable to replicate episomally. This plasmid carries the Ec_ilvC_coSc^{Q110V} (SEQ ID NO: 24) mutant (i.e. codon optimized for expression in S. cerevisiae) and S. cerevisiae ILV3ΔN genes, expressed under the control of the S. cerevisiae TDH3 and TEF1 promoters, respectively. pGV1936 was constructed using an SOE PCR method that amplified the Ec_ilvC_coSc gene while simultaneously introducing the nucleotide changes coding for a Q110V mutation. Specifically, primers 1624 and 1814 were used to amplify a portion of plasmid pGV1774 containing the Ec_ilvC_coSc gene; primers 1813 and 1798 were used to amplify a portion of plasmid pGV1824 that also contained the Ec_ilvC_coSc gene. The two separate PCR products were gel purified, eluted in 15 μL, and 3 μL of each were used as a template along with primers 1624 and 1798. The resulting PCR product was digested with XhoI plus NotI and ligated into pGV1765 that had been digested with XhoI plus NotI, yielding pGV1936. Candidate clones of pGV1936 were confirmed by sequencing, using primers 350, 1595, and 1597.

[0476] pGV1994: Mutations found in variant Ec_IlvC^{6E6-his6} were introduced into pGV1824 by SOE PCR. The 5′ PCR used primers 1898 and 2037 and the 3′ PCR used primers 1893 and 2036. Each of these primer pairs were used with pGV1894 as the template in two separate PCR reactions. The product was used in a second PCR with the end primers 1898 and 1893 to yield a final PCR product. This final PCR product has a 5′ SalI restriction site and 3′ BglII followed by NotI restriction sites. These were cloned into pGV1662 using the SalI and NotI site and yielding plasmid pGV1994 which carries Ec_ilvC_coSc^{6E6} (SEQ ID NO: 35).

[0477] pGV2020 (SEQ ID NO: 121) is an empty G418 resistant 2-micron yeast vector that was generated by removing the LI_kivd2_coEc sequence from pGV2017. This was carried out by amplifying the TDH3 promoter from pGV2017 using primers 1926 and 1927, digesting with SalI and NotI and cloning into the same sites of pGV2017.

[0478] pGV2082 (SEQ ID NO: 122) is a G418 resistant yeast 2-micron plasmid for the expressions of Ec_ilvC_coSc^{Q110V} (SEQ ID NO: 24), LI_ilvD_coSc (SEQ ID NO: 54), LI_kivd2_coEc (SEQ ID NO: 48), and Dm_ADH (SEQ ID NO: 60). A fragment carrying the PGK1 promoter, LI_kivd2_coEc and a short region of the PDC1 terminator sequence was obtained by cutting pGV2047 with AvrII and NcoI. This fragment was treated with Klenow to generate blunt ends then cloned into pGV2044 that had been digested with EcoRI and SbfI and the overhangs filled in with Klenow. This construction replaced the CUP1 promoter and the Bs_alsS1_coSc (SEQ ID NO: 6) in pGV2044 with the PGK1 promoter and LI_kivd2_coEc.

[0479] pGV2193: The Ec_IlvC variant encoded by Ec_ilvC_coSc^{6E6-his6} (SEQ ID NO: 33) encoded on pGV2241 (SEQ ID NO: 124) served as template for error-prone PCR using primers pGV1994ep_for and pGV1994ep_rev yielding variant Ec_IlvC^{P2D1-his6} (SEQ ID NO: 38) which is encoded by Ec_ilvC_coSc^{P2D1-his6} (SEQ ID NO: 37) on construct pGV2193.

[0480] pGV2227 (SEQ ID NO: 123) is a G418 resistant yeast 2-micron plasmid for the expressions of Ec_ilvC_coSc^{Q110V} (SEQ ID NO: 24), LI_ilvD_coSc (SEQ ID NO: 54), LI_kivd2_coEc (SEQ ID NO: 48), and LI_adhA (SEQ ID NO: 66). pGV2227 is a derivative of pGV2201 where the BamHI and XhoI sites at the 3′ end of the LI_adhA were removed and replaced with an AvrII site. This construction was carried out by cloning into the NheI-MluI sites of pGV2202a fragment carrying the 3′ end of the LI_adhA sequence, an AvrII site, and the 5′ part of the CYC1 terminator. This fragment was generated by SOE PCR combining a PCR product using primers 2091 and 2352 with pGV2201 as template and a PCR product using primers 2353 and 772 with pGV2201 as template. The sequences of primers 2352 and 2353 overlap and introduce an AvrII site. This SOE PCR product was digested with NheI and MluI for cloning into pGV2201.

[0481] pGV2238: The Ec_IlvC variant encoded by Ec_ilvC_coSc^{P2D1-his6} (SEQ ID NO: 37) encoded on pGV2193 served as parent for an additional error-prone PCR round using the same primers as described before on template DNA pGV2193 yielding an improved KARI variant named Ec_IlvC^{P2D1-A1-his6} (SEQ ID NO: 42) which is encoded by the gene Ec_ilvC_coSc^{P2D1-A1-his6} (SEQ ID NO: 41) on plasmid pGV2238.

[0482] pGV2241 (SEQ ID NO: 124): The gene Ec_ilvC_coSc^{6E6} (SEQ ID NO: 35) was his-tagged using primers pGV1994_ep_for and 1994hisrev, cleaned with the Zymo PCR clean up kit (Zymo Research), NotI and SalI digested, and ligated into similarly digested pGV1994, resulting in construct pGV2241 coding for Ec_ilvC_coSc^{6E6-his6} (SEQ ID NO: 33).

[0483] pGV2242 (SEQ ID NO: 125) is a G418 resistant yeast 2-micron plasmid for the expressions of Ec_ilvC_coSc^{P2D1} (SEQ ID NO: 39), LI_ilvD_coSc (SEQ ID NO: 54), LI_kivd2_coEc (SEQ ID NO: 48), and LI_adhA (SEQ ID NO: 66). This plasmid was generated by cloning the SalI-BspEI fragment of pGV2193 carrying the region encoding for Ec_IlvC with the relevant mutations for the Ec_ilvC_coSc^{P2D1} allele into the XhoI-BspEI sites of pGV2227 (SEQ ID NO: 123).

TABLE 3
Strains disclosed herein

| Strain No. | Description |
|---|---|
| GEVO1186 | S. cerevisiae CEN.PK2 (MATa/α ura3/ura3 leu2/leu2 his3/his3 trp1/trp1 |
| | PDC1/PDC1 PDC5/PDC5 PDC6/PDC6) |
| GEVO1385 | E. coli BW25113, ΔldhA-fnr::FRT, ΔadhE::FRT, Δfrd::FRT, Δpta::FRT, |
| | ΔpflB::FRT, F′ (laclq+), attB::(Sp⁺ laclq⁺ tetR⁺) |
| GEVO1399 | E. coli BW25113, ΔldhA-fnr::FRT, ΔadhE::FRT, Δfrd::FRT, Δpta::FRT, |
| | pflB::FRT, Δzwf::FRT F′ (laclq+) |
| GEVO1608 | E. coli BW25113, ΔldhA-fnr::FRT, ΔadhE::FRT, Δfrd::FRT, ΔpflB::FRT, |
| | Δpta::FRT, ΔyqhD::FRT-Kan-FRT, F′ (laclq+) |
| GEVO1725 | E. coli BW25113, ΔldhA-fnr::FRT, ΔadhE::FRT, Δfrd::FRT, Δpta::FRT, |
| | ΔpflB::FRT, ΔmaeA::FRT, ΔpykA::FRT, ΔpykF::FRT, F′ (laclq+) |
| GEVO1745 | E. coli BW25113, ΔldhA-fnr::FRT, ΔadhE::FRT, Δfrd::FRT, ΔpflB::FRT, |
| | Δpta::FRT, ΔyqhD::FRT |
| GEVO1748 | E. coli BW25113, ΔldhA-fnr::FRT, ΔadhE::FRT, Δfrd::FRT, Δpta::FRT, |
| | pflB::FRT, F′ (laclq+), ΔilvC::PLlacO1::Ll_kivd1::Ec_ilvD_coEc::FRT |
| GEVO1749 | E. coli BW25113, ΔldhA-fnr::FRT, Δfrd::FRT, Δpta::FRT, pflB::FRT, F′ |
| | (laclq+), ΔadhE::[PLlacO1::Ll_kivd1::Ec_ilvD_coEc::FRT] |
| GEVO1750 | E. coli BW25113, ΔldhA-fnr::FRT, ΔadhE::FRT, Δfrd::FRT, Δpta::FRT, |
| | ΔpflB::FRT, ΔmaeA::FRT, F′ (laclq+), attB::(Sp+ laclq+ tetR+) |
| GEVO1751 | E. coli BW25113, ΔldhA-fnr::FRT, ΔadhE::FRT, Δfrd::FRT, Δpta::FRT, |
| | ΔpflB::FRT, ΔmaeA::FRT, ΔpykA::FRT, ΔpykF::FRT, F′ (laclq+), attB::(Sp+ |
| | laclq+ tetR+) |
| GEVO1777 | E. coli W3110, ΔilvC::FRT, attB::(Sp+ laclq+ tetR+) |
| GEVO1780 | JCL260 transformed with pGV1655 and pGV1698 |
| GEVO1803 | S. cerevisiae CEN.PK2, MATa/alpha ura3/ura3 leu2/leu2 his3/his3 trp1/trp1 |
| | pdc1::Bs_alsS2, TRP1/PDC1 |
| GEVO1844 | E. coli BW25113, Δ(ldhA-fnr::FRT) ΔadhE::FRT Δfrd::FRT Δpta::FRT |
| | ΔpflB::FRT ΔilvC::P_{LlacO1}::Ll_kivd1::Ec_ilvD_coEc::FRT ΔsthA::FRT |
| GEVO1846 | E. coli BW25113, ΔldhA-fnr::FRT, ΔadhE::FRT, Δfrd::FRT, Δpta::FRT, |
| | pflB::FRT, F′ (laclq+), ΔilvC::PLlacO1::Ll_kivd1::Ec_ilvD_coEc::FRT, |
| | pGV1745, pGV1698 |
| GEVO1859 | E. coli BW25113, ΔldhA-fnr::FRT, Δfrd::FRT, Δpta::FRT, F′ (laclq+), |
| | ΔadhE::[pLlacO1::Ll_kivd1::Ec_ilvD_coEc::FRT], |
| | pflB::[pLlacO1::Bs_alsS1::Ec_ilvC_coEc::FRT] |
| GEVO1886 | E. coli BW25113, ΔldhA-fnr::FRT, Δfrd::FRT, Δpta::FRT, F′ (laclq+), |
| | ΔadhE::[pLlacO1::Ll_kivd1::Ec_ilvD_coEc::FRT], ΔpflB::[pLlacO1::Bs_alsS1 |
| | ::Ec_ilvC_coEc::FRT] ΔsthA::[pLlacO1::pntA::pntB::FRT] |
| GEVO1993 | E. coli BW25113, ΔldhA-fnr::FRT, ΔadhE::FRT, Δfrd::FRT, DpflB::FRT, F′ |
| | (laclq+), ΔilvC::PLlacO1::Ll_kivd1::Ec_ilvD_coEc::FRT, |
| | Δpta::PLlacO1::Bs_alsS1, FRT::KAN::FRT |
| GEVO2107 | S. cerevisiae CEN.PK2, MATa/alpha ura3/ura3 leu2/leu2 his3/his3 trp1/trp1 |
| | pdc1::Bs_alsS2, TRP1/PDC1 pdc6::{ScTEF1p-Ll_kivd2_coEcScTDH3p- |
| | Dm_ADH URA3}/PDC6 |
| GEVO2158 | S. cerevisiae CEN. PK2; MATa/α ura3/ura3 leu2/leu2 his3/his3 trp1/trp1 |
| | pdc1::Bs_alsS2, TRP1/PDC1 pdc5::{ScTEF1prom-Sc_ILV3ΔN ScTDH3prom- |
| | Ec_ilvC_coSc^{Q110V} LEU2}/PDC5 pdc6::{ScTEF1p-Ll_kivd2_coEc ScTDH3p- |
| | Dm_ADH URA3}/PDC6 |
| GEVO2302 | S. cerevisiae CEN.PK2; MATa ura3 leu2 his3 trp1 pdc1::Bs_alsS2, TRP1 |
| | pdc5::{P_{TEF1}:Sc_ILV3ΔN P_{TDH3}:Ec_ilvC_coSc^{Q110V} LEU2} pdc6::{P_{TEF1}: |
| | Ll_kivd2_coEc P_{TDH3}:Dm_ADH URA3} |
| GEVO2710 | S. cerevisiae CEN.PK2; MATa ura3 leu2 his3 trp1 pdc1::{P_{CUP1}- |
| | Bs_alsS2, TRP1} pdc5::{P_{TEF1}:Sc_ILV3ΔN P_{TDH3}:Ec_ilvC_coSc^{Q110V}, LEU2} |
| | pdc6::{P_{TEF1}: Ll_kivd2_coEc P_{TDH3}:Dm_ADH, URA3}, evolved for C2 |
| | supplement-independence, glucose tolerance and faster growth |
| GEVO2711 | S. cerevisiae CEN.PK2; MATa ura3 leu2 his3 trp1 pdc1::{P_{CUP1}- |
| | Bs_alsS2, TRP1} pdc5::{P_{TEF1}:Sc_ILV3ΔN P_{TDH3}:Ec_ilvC_coSc^{Q110V}, LEU2} |
| | pdc6::{P_{TEF1}: Ll_kivd2_coEc P_{TDH3}:Dm_ADH, URA3}, evolved for C2 |
| | supplement-independence, glucose tolerance and faster growth |
| GEVO2712 | S. cerevisiae CEN.PK2; MATa ura3 leu2 his3 trp1 pdc1::{P_{CUP1}- |
| | Bs_alsS2, TRP1} pdc5::{P_{TEF1}:Sc_ILV3ΔN P_{TDH3}:Ec_ilvC_coSc^{Q110V}, LEU2} |
| | pdc6::{P_{TEF1}: Ll_kivd2_coEc P_{TDH3}:Dm_ADH, URA3}, evolved for C2 |
| | supplement-independence, glucose tolerance and faster growth |
| GEVO2799 | S. cerevisiae CEN.PK2; MATa ura3 leu2 his3 trp1 pdc1::{P_{CUP1}- |
| | Bs_alsS2, TRP1} pdc5::{P_{TEF1}:Sc_ILV3ΔN P_{TDH3}:Ec_ilvC_coSc^{Q110V}, LEU2} |
| | pdc6::{P_{TEF1}: Ll_kivd2_coEc P_{TDH3}:Dm_ADH, URA3}, evolved for C2 |
| | supplement-independence, glucose tolerance and faster growth |
| GEVO2792 | GEVO2710 transformed with pGV2020 |
| GEVO2844 | GEVO2799 transformed with pGV2020 |
| GEVO2847 | GEVO2799 transformed with pGV2082 |
| GEVO2848 | GEVO2799 transformed with pGV2227 |
| GEVO2849 | GEVO2799 transformed with pGV2242 |
| GEVO2851 | GEVO2711 transformed with pGV2227 |
| GEVO2052 | GEVO2711 transformed with pGV2242 |
| GEVO2854 | GEVO2710 transformed with pGV2082 |
| GEVO2855 | GEVO2710 transformed with pGV2227 |
| GEVO2856 | GEVO2710 transformed with pGV2242 |
| GEVO5001 | S. cerevisiae CEN.PK2, Δpdc1 Δpdc5 Δpdc6 expressing an isobutanol |
| | pathway (ALS, KARI, DHAD, KIVD, ADH) |
| GEVO5002 | GEVO5001 P_{TEF1}:NADH kinase P_{TDH3}:NADP⁺ phosphatase HPH |
| GEVO5003 | GEVO5001, P_{TDH3}:Kl_GDP1 HPH |
| GEVO5004 | GEVO5001 P_{TEF1}:ess:pntA P_{TDH3}:ess:pntB HPH |
| GEVO5005 | GEVO5001 P_{TEF1}:mts:pntA P_{TDH3}:mts:pntB HPH |
| GEVO5006 | GEVO5001 P_{ADH1}:PYC1 P_{TEF1}:MDH2 P_{TDH3}:maeB HPH |
| E. coli BL21 | Lucigen Corporation (Middleton, WI) |
| (DE3) | |
| E. coli | Lutz, R. and Bujard, H, Nucleic Acids Research (1997) 25 1203-1210 |
| DH5αZ1 | |
| JCL260* | E. coli BW25113, ΔldhA-fnr::FRT, ΔadhE::FRT, Δfrd::FRT, ΔpflB::FRT, |
| | Δpta::FRT, F′ (lacIq+) |

*These strains are described in PCT/US2008/053514

TABLE 4
Plasmids disclosed herein

| | | SEQ ID | |
|---|---|---|---|
| GEVO No. | FIG. | NO | Genotype or Reference |
| pKD13 | n/a | | Datsenko, K and Wanner, B. PNAS 2000, 97: 6640-5 |
| pKD46 | n/a | | Datsenko, K and Wanner, B. PNAS 2000, 97: 6640-5 |
| pSA55* | n/a | | pLlacO1::Ll_kivd1::ADH2, ColE1, Amp |
| pSA69* | n/a | | pLlacO1::Bs_alsS1::Ec_ilvC::Ec_ilvD, p15A, Kan |
| pET22b(+) | n/a | | Novagen, Gibbstown, NJ |
| pET22b[ilvCco] | n/a | | Novagen, Gibbstown, NJ |
| pGV1102 | | 101 | P_{TEF1}-HA-tag-MCS-T_{CYC1}, URA3,2-micron, bla, pUC-ori |
| pGV1323 | | 102 | |
| pGV1485 | | 103 | PLlacO1::Ll_kivd1::ADH2, pSC101, Km |
| pGV1490 | | 104 | pLtetO1:: p15A, Cm |
| pGV1527 | | | PLtetO1::Ll_kivd1_coEc::S. cerevisiae ADH2 ColE1, bla |
| pGV1572 | | 105 | PLlacO1::empty, p15A, Cm^{R} |
| pGV1573 | | 106 | PLlacO1::GDP1, p15A, Cm^{R} |
| pGV1575 | | 107 | PLlacO1::gapC, p15A, Cm^{R} |
| pGV1609 | | 108 | PLlacO1::Bs_alsS1::ilvC::Ec_ilvD, p15A, Cm |
| pGV1631 | | | PLlacO1::Ll_kivd1, ColE1, Amp |
| pGV1655 | | 109 | PLlacO1::Ll_kivd1::Ec_ilvD_coEc,, pSC101, Km |
| pGV1661 | | 110 | pLtetO1::maeB::ppc::mdh, p15A, Cm |
| pGV1662 | | | |
| pGV1685 | | 111 | PLtetO1::pntAB, p15A, Cm |
| pGV1698 | | 112 | PLlacO1::Bs_alsS1::ilvC, bla, ColE1 ORI |
| pGV1705-A | | | PLlacO1::Ec_yqhD bla, ColE1 ORI |
| pGV1711 | | 113 | PLlacO1::(no ORF) bla, ColE1 ORI |
| pGV1716 | | 114 | PLlacO1::Bs_alsS1::Saccharomyces cerevisiae |
| | | | ADH2::ilvC bla, ColE1 ORI |
| pGV1720 | | 115 | pLlacO1::empty, pSC101, Km |
| pGV1730 | | 116 | P_{CUP1}-Bs_alsS2-PDC1 3′ region-PDC1 5′ region, TRP1, |
| | | | bla, pUC ori |
| pGV1745 | | 117 | pLlacO1::pntAB, pSC101, Km |
| pGV1748 | | | PLlacO1::Bs_alsS1::Ec_fucO::Ec_ilvC_coEc bla, ColE1 |
| | | | ORI |
| pGV1748-A | | | PLlacO1::Ec_fucO:: bla, ColE1 ORI |
| pGV1749 | | | PLlacO1:: Bs_alsS1::Dm_ADH: Ec_ilvC_coEc bla, |
| | | | ColE1 ORI |
| pGV1749-A | | | PLlacO1::Dm_ADH:: bla, ColE1 ORI |
| pGV1772 | | | pLtetO1::maeB::pck::mdh, p15A, Cm |
| pGV1777 | | 118 | PLlacO1::Ec_ilvC_coEc, bla, ColE1 ORI |
| pGV1778 | | | PLlacO1:: Bs_alsS1::Kp_dhaT::Ec_ilvC_coEc bla, ColE1 |
| | | | ORI |
| pGV1778-A | | | PLlacO1::Kp_dhaT::bla, ColE1 ORI |
| pGV1824 | | | P_{TEF1}::Ec_ilvC_coSc:T_{CYC1}, pUC ORI, URA3, 2μ ORI, bla |
| pGV1914 | | 119 | P_{TEF1}:Ll_kivd2: P_{TDH3}:Dm_ADH PDC6 5′,3′ targeting |
| | | | homology URA3 pUC ori bla(ampR) |
| pGV1925 | | | pLlacO1::Ec_fucO ::Ec_ilvC_coEc::bla, ColE1 ORI |
| pGV1927 | | | pLlacO1::Ec_fucO::Ec_ilvC_coEc^{S78D} bla, ColE1 ORI |
| pGV1936 | | 120 | P_{TEF1}:Sc_ILV3ΔN P_{TDH3}:Ec_ilvC_coSc^{Q110V} PDC5 5′,3′ |
| | | | targeting homology LEU2 |
| pGV1938 | | | pLlac01::ilvC_coS78D bla, ColE1 ORI |
| pGV1939 | | | pLlacO1::E. coli fucO bla, ColE1 ORI |
| pGV1975 | | | pLlacO1::Ec_fucO::Ec_ilvC_coEc^{6E6} bla, ColE1 ORI |
| pGV1976 | | | pLlacO1::Ec_fucO::Ec_ilvC_coEc^{2H10} bla, ColE1 ORI |
| pGV1994 | | | P_{TEF1}::Ec_ilvC_coSc^{6E6}:T_{CYC1}, bla, pUC ORI, URA3, 2μ |
| | | | ORI |
| pGV2020 | | 121 | P_{Sc}_{_{—}}_{TEF1}, P_{Sc}_{_{—}}_{TPI1}, P_{Sc}_{_{—}}_{TPI1}G418^{R}, AP^{r}, 2μ - Vector Control |
| pGV2082 | | 122 | P_{TEF1}-Ll_ilvD_coSc-P_{TDH3}-Ec_ilvC_coSc^{Q110V}-P_{TPI1}- |
| | | | G418R-P_{PGK1}-Ll_kivd2_coEc-PDC1-3′region-P_{ENO2}- |
| | | | Dm_ADH 2μ bla, pUC-ori |
| pGV2193 | | | P_{TEF1}::Ec_ilvC_coSc^{P2D1-his6}:T_{CYC1}, bla, pUC ORI, URA3, |
| | | | 2μ ORI |
| pGV2227 | | 123 | P_{TEF1}-Ll_ilvD_coSc-P_{TDH3}-Ec_ilvC_coSc^{Q110V}-P_{TPI1}- |
| | | | G418R-P_{PGK1}-Ll_kivd2_coEc-PDC1-3′region-P_{ENO2}- |
| | | | Ll_adhA 2μ bla, pUC-ori |
| pGV2238 | | | P_{TEF1}::Ec_ilvC_coSc^{P2D1-A1-his6}:T_{CYC1}, bla, pUC ORI, |
| | | | URA3, 2μ ORI. |
| pGV2241 | | 124 | P_{TEF1}::Ec_ilvC_coSc^{6E6-his6}:T_{CYC1}, bla, pUC ORI, URA3, |
| | | | 2μ ORI. |
| pGV2242 | | 125 | P_{TEF1}-Ll_ilvD_coSc-P_{TDH3}-Ec_ilvC_coSc^{P2D1}-P_{TPI1}- |
| | | | G418R-P_{PGK1}-Ll_kivd2_coEc-PDC1-3′region-P_{ENO2}- |
| | | | Ll_adhA 2μ bla, pUC-ori |
| pGV6000 | | | P_{TEF1}:NADH kinase P_{TDH3}:NADP⁺ phosphatase HPH |
| pGV6001 | | | P_{TDH3}:Kl_GDP1 HPH |
| pGV6002 | | | P_{TEF1}:ess:pntA P_{TDH3}:ess:pntB HPH |
| pGV6003 | | | P_{TEF1}:mts:pntA P_{TDH3}:mts:pntB HPH |
| pGV6004 | | | P_{ADH1}:PYC1 P_{TEF1}:MDH2 P_{TDH3}:maeB HPH |

*These plasmids are described in PCT/US2008/053514

TABLE 5
Amino acid and nucleotide sequences of enzymes and
genes disclosed herein

| | | | Corresponding |
|---|---|---|---|
| | | Gene | Protein |
| Enz. | Source | (SEQ ID NO) | (SEQ ID NO) |
| pntA | E. coli | E. coli pntA | E. coli PntA |
| | | (SEQ ID NO: 1) | (SEQ ID NO: 2) |
| pntB | E. coli | E. coli pntB | E. coli PntB |
| | | (SEQ ID NO: 3) | (SEQ ID NO: 4) |
| ALS | B. subtilis | Bs_alsS1 | Bs_AlsS1 |
| | | (SEQ ID NO: 5) | (SEQ ID NO: 7) |
| | | Bs_alsS1_coSc | |
| | | (SEQ ID NO: 6) | |
| | | Bs_alsS2 | Bs_AlsS2 |
| | | (SEQ ID NO: 8) | (SEQ ID NO: 9) |
| KARI | E. coli | Ec_ilvC | Ec_IlvC |
| | | (SEQ ID NO: 10) | (SEQ ID NO: 13) |
| | | Ec_ilvC_coEc | |
| | | (SEQ ID NO: 11) | |
| | | Ec_ilvC_coSc | |
| | | (SEQ ID NO: 12) | |
| | | Ec_ilvC_coEc^{his6} | Ec_IlvC^{his6} |
| | | (SEQ ID NO: 14) | (SEQ ID NO: 15) |
| | | Ec_ilvC_coEc^{S78D-his6} | Ec_IlvC^{S78D-his6} |
| | | (SEQ ID NO: 16) | (SEQ ID NO: 17) |
| | | Ec_ilvC_coEc^{S78D} | Ec_IlvC^{S78D} |
| | | (SEQ ID NO: 18) | (SEQ ID NO: 19) |
| | | Ec_ilvC_coEc^{Q110A-his6} | Ec_IlvC^{Q110A-his6} |
| | | (SEQ ID NO: 20) | (SEQ ID NO: 21) |
| | | Ec_ilvC_coEc^{Q110V-his6} | Ec_IlvC^{Q110V-his6} |
| | | (SEQ ID NO: 22) | (SEQ ID NO: 23) |
| | | Ec_ilvC_coSc^{Q110V} | Ec_IlvC^{Q110V} |
| | | (SEQ ID NO: 24) | (SEQ ID NO: 25) |
| | | Ec_ilvC_coEc^{B8-his6} | Ec_IlvC^{B8-his6} |
| | | (SEQ ID NO: 26) | (SEQ ID NO: 27) |
| | | Ec_ilvC_coEc^{B8A/1S-his6} | Ec_IlvC^{B8A/1S-his6} |
| | | (SEQ ID NO: 28) | (SEQ ID NO: 29) |
| | | Ec_ilvC_coEc^{2H10-his6} | Ec_IlvC^{2H10-his6} |
| | | (SEQ ID NO: 30) | (SEQ ID NO: 31) |
| | | Ec_ilvC_coEc^{6E6-his6} | Ec_IlvC^{6E6-his6} |
| | | (SEQ ID NO: 32) | (SEQ ID NO: 34) |
| | | Ec_ilvC_coSc^{6E6-his6} | |
| | | (SEQ ID NO: 33) | |
| | | Ec_ilvC_coSc^{6E6} | Ec_IlvC^{6E6} |
| | | (SEQ ID NO: 35) | (SEQ ID NO: 36) |
| | | Ec_ilvC_coSc^{P2D1-his6} | Ec_IlvC^{P2D1-his6} |
| | | (SEQ ID NO: 37) | (SEQ ID NO: 38) |
| | | Ec_ilvC_coSc^{P2D1} | Ec_IlvC^{P2D1} |
| | | (SEQ ID NO: 39) | (SEQ ID NO: 40) |
| | | Ec_ilvC_coSc^{P2D1-A1-his6} | Ec_IlvC^{P2D1-A1-his6} |
| | | (SEQ ID NO: 41) | (SEQ ID NO: 42) |
| | | Ec_ilvC_coSc^{P2D1-A1} | Ec_IlvC^{P2D1-A1} |
| | | (SEQ ID NO: 43) | (SEQ ID NO: 44) |
| KIVD | L. lactis | Ll_Kivd1 | Ll_kivd1 |
| | | (SEQ ID NO: 45) | (SEQ ID NO: 47) |
| | | Ll_Kivd1_coEc | |
| | | (SEQ ID NO: 46) | |
| | | Ll_kivd2_coEc | Ll_Kivd2 |
| | | (SEQ ID NO: 48) | (SEQ ID NO: 49) |
| DHAD | E. coli | Ec_ilvD | Ec_IlvD |
| | | (SEQ ID NO: 50) | (SEQ ID NO: 52) |
| | | Ec_ilvD_coEc | |
| | | (SEQ ID NO: 51) | |
| | L. lactis | Ll_ilvD_coSc | Ll_IlvD |
| | | (SEQ ID NO: 54) | (SEQ ID NO: 55) |
| | S. cerevisiae | Sc_ILV3 | Sc_Ilv3 |
| | | (SEQ ID NO: 56) | (SEQ ID NO: 57) |
| | | Sc_ILV3ΔN | Sc_Ilv3ΔN |
| | | (SEQ ID NO: 58) | (SEQ ID NO: 59) |
| ADH | D. melanogaster | Dm_ADH | Dm_Adh |
| | | (SEQ ID NO: 60) | (SEQ ID NO: 61) |
| | K. pneumoniae | Kp_dhaT | Kp_DhaT |
| | | (SEQ ID NO: 62) | (SEQ ID NO: 63) |
| | E. coli | Ec_fucO | Ec_FucO |
| | | (SEQ ID NO: 64) | (SEQ ID NO: 65) |
| | L. lactis | Ll_adhA | Ll_AdhA |
| | | (SEQ ID NO: 66) | (SEQ ID NO: 67) |
| | E. coli | Ec_yqhD | Ec_YqhD |
| | | (SEQ ID NO: 68) | (SEQ ID NO: 69) |

TABLE 6
Primers sequences disclosed herein

| No. (SEQ ID NO) | Sequence (listed as 5′ to 3′) |
|---|---|
| XX1 | CGCACCGGTTTTCTCCTCTTTAATGAATTCGGTCAGTGCGTCCTGC |
| (SEQ ID NO: 201) | |
| XX2 | GCGGCCGCCCTAGGGCGTTCGGCTGCGGCGAGCGGT |
| (SEQ ID NO: 202) | |
| XX3 | CGCGAATTCGGATCCGAGGAGAAAATAGTTATGAACAACTTTAATCTGCACAC |
| (SEQ ID NO: 203) | CCC |
| XX4 | GCGCCTAGGGCGGCCGCTTAGCGGGCGGCTTCGTATATACGG |
| (SEQ ID NO: 204) | |
| 50 | GCAGTTTCACCTTCTACATAATCACGACCGTAGTAGGTATCATTCCGGGGATC |
| (SEQ ID NO: 205) | CGTCGACC |
| 73 | CTGGCTTAAGTACCGGGTTAGTTAACTTAAGGAGAATGACGTGTAGGCTGGA |
| (SEQ ID NO: 206) | GCTGCTTC |
| 74 | CTCAAACTCATTCCAGGAACGACCATCACGGGTAATCATCATTCCGGGGATCC |
| (SEQ ID NO: 207) | GTCGACC |
| 116 | CAGCGTTCGCTTTATATCCCTTACGCTGGCCCTGTACTGCTGGAAGTGTAGG |
| (SEQ ID NO: 208) | CTGGAGCTGCTTC |
| 117 | TTCGGCTTGCCAGAAATTATCGTCAATGGCCTGTTGCAGGGCTTCATTCCGG |
| (SEQ ID NO: 209) | GGATCCGTCGACC |
| 350 | CTTAAATTCTACTTTTATAGTTAGTC |
| (SEQ ID NO: 210) | |
| 474 | CAAAGCTGCGGATGATGACGAGATTACTGCTGCTGTGCAGACTGAATTCCGG |
| (SEQ ID NO: 211) | GGATCCGTCGACC |
| 772 | AGGAAGGAGCACAGACTTAG |
| (SEQ ID NO: 212) | |
| 868 | CACAACATCACGAGGAATCACCATGGCTAACTACTTCAATACACGTGTAGGCT |
| (SEQ ID NO: 213) | GGAGCTGCTTC |
| 869 | CTTAACCCGCAACAGCAATACGTTTCATATCTGTCATATAGCCGCATTCCGGG |
| (SEQ ID NO: 214) | GATCCGTCGACC |
| 1030 | GTCGGTGAACGCTCTCCTGAGTAGGGTGTAGGCTGGAGCTGCTTC |
| (SEQ ID NO: 215) | |
| 1031 | GAAGCAGCTCCAGCCTACACCCTACTCAGGAGAGCGTTCACCGAC |
| (SEQ ID NO: 216) | |
| 1032 | CACAACATCACGAGGAATCACCATGGCTAACTACTTCAATACACCACGAGGCC |
| (SEQ ID NO: 217) | CTTTCGTCTTCACCTC |
| 1155 | CCCAACCCGCATTCTGTTTGGTAAAGGCGCAATCGCTGGTTTACGGTGTAGG |
| (SEQ ID NO: 218) | CTGGAGCTGCTTC |
| 1156 | CAATCGCGGCGTCAATACGCTCATCATCGGAACCTTCAGTGATGTATTCCGG |
| (SEQ ID NO: 219) | GGATCCGTCGACC |
| 1187 | CGGATAAAGTTCGTGAGATTGCCGCAAAACTGGGGCGTCATGTGGGTGTAGG |
| (SEQ ID NO: 220) | CTGGAGCTGCTTC |
| 1188 | CAGACATCAAGTAACCTTTATCGCGCAGCAGATTAACCGCTTCGCATTCCGGG |
| (SEQ ID NO: 221) | GATCCGTCGACC |
| 1191 | GGCACTCACGTTGGGCTGAGACACAAGCACACATTCCTCTGCACGGTGTAGG |
| (SEQ ID NO: 222) | CTGGAGCTGCTTC |
| 1192 | GCACCAGAAACCATAACTACAACGTCACCTTTGTGTGCCAGACCGATTCCGG |
| (SEQ ID NO: 223) | GGATCCGTCGACC |
| 1205 | GTTATCTAGTTGTGCAAAACATGCTAATGTAGCCACCAAATCCACGAGGCCCT |
| (SEQ ID NO: 224) | TTCGTCTTCACCTC |
| 1218 | GCTCACTCAAAGGCGGTAATACGTGTAGGCTGGAGCTGCTTC |
| (SEQ ID NO: 225) | |
| 1219 | GAAGCAGCTCCAGCCTACACGTATTACCGCCTTTGAGTGAGC |
| (SEQ ID NO: 226) | |
| 1220 | CGTAGAATCACCAGACCAGC |
| (SEQ ID NO: 227) | |
| 1296 | TTTTGTCGACGGATCCAGGAGACAACATTATGTCTATTCCAGAAACTCAAAAA |
| (SEQ ID NO: 228) | GCG |
| 1297 | TTTTGTCGACGCGGCCGCTTATTTAGAGGTGTCCACCACGTAACGG |
| (SEQ ID NO: 229) | |
| 1321 | AATCATATCGAACACGATGC |
| (SEQ ID NO: 230) | |
| 1322 | TCAGAAAGGATCTTCTGCTC |
| (SEQ ID NO: 231) | |
| 1323 | ATCGATATCGTGAAATACGC |
| (SEQ ID NO: 232) | |
| 1324 | AGCTGGTCTGGTGATTCTAC |
| (SEQ ID NO: 233) | |
| 1341 | TGCTGAAAGAGAAATTGTCC |
| (SEQ ID NO: 234) | |
| 1342 | TTTCTTGTTCGAAGTCCAAG |
| (SEQ ID NO: 235) | |
| 1364 | TTTTGCGGCCGCTTAGATGCCGGAGTCCCAGTGCTTG |
| (SEQ ID NO: 236) | |
| 1365 | AGTTGTTGACGCAGGTTCAGAG |
| (SEQ ID NO: 237) | |
| 1436 | AAATGACGACGAGCCTGAAG |
| (SEQ ID NO: 238) | |
| 1437 | GACCTGACCATTTGATGGAG |
| (SEQ ID NO: 239) | |
| 1439 | CAATTGGCGAAGCAGAACAAG |
| (SEQ ID NO: 240) | |
| 1469 | TTTTAGATCTAGGAGATACCGGTATGTCGTTTACTTTGACCAACAAG |
| (SEQ ID NO: 241) | |
| 1440 | ATCGTACATCTTCCAAGCATC |
| (SEQ ID NO: 242) | |
| 1441 | AATCGGAACCCTAAAGGGAG |
| (SEQ ID NO: 243) | |
| 1442 | AATGGGCAAGCTGTTTGCTG |
| (SEQ ID NO: 244) | |
| 1443 | TGCAGATGCAGATGTGAGAC |
| (SEQ ID NO: 245) | |
| 1470 | TTTTGGATCCAGGAAATAGATCTATGATGGCTAACAGAATGATTCTGAACG |
| (SEQ ID NO: 246) | |
| 1471 | TTTTGCGGCCGCTTACCAGGCGGTATGGTAAAGCTC |
| (SEQ ID NO: 247) | |
| 1479 | CCGATAGGCTTCCGCCATCGTCGGGTAGTTAAAGGTGGTGTTGAGTGTAGGC |
| (SEQ ID NO: 248) | TGGAGCTGCTTC |
| 1485 | GCCTTTATTGTACGCTTTTTACTGTACGATTTCAGTCAAATCTAACACGAGGCC |
| (SEQ ID NO: 249) | CTTTCGTCTTCACCTC |
| 1486 | AAGTACGCAGTAAATAAAAAATCCACTTAAGAAGGTAGGTGTTACATTCCGGG |
| (SEQ ID NO: 250) | GATCCGTCGACC |
| 1526 | TCGACGAGGAGACAACATTGTGTAGGCTGGAGCTGCTTC |
| (SEQ ID NO: 251) | |
| 1527 | GAAGCAGCTCCAGCCTACACAATGTTGTCTCCTCGTCGA |
| (SEQ ID NO: 252) | |
| 1539 | CCATTCTGTTGCTTTTATGTATAAGAACAGGTAAGCCCTACCATGGAGAATTGT |
| (SEQ ID NO: 253) | GAGCGGATAAC |
| 1561 | GCAATCCTGAAAGCTCTGTAACATTCCGGGGATCCGTCGACC |
| (SEQ ID NO: 254) | |
| 1562 | GGTCGACGGATCCCCGGAATGTTACAGAGCTTTCAGGATTGC |
| (SEQ ID NO: 255) | |
| 1563 | CAAATCGGCGGTAACGAAAGAGGATAAACCGTGTCCCGTATTATTCACGAGG |
| (SEQ ID NO: 256) | CCCTTTCGTCTTCACCTC |
| 1566 | TCCCACCCAATCAAGGCCAACG |
| (SEQ ID NO: 257) | |
| 1567 | TCCACCTGGTGCCAATGAACCG |
| (SEQ ID NO: 258) | |
| 1587 | CGGCTGCCAGAACTCTACTAACTG |
| (SEQ ID NO: 259) | |
| 1588 | GCGACGTCTACTGGCAGGTTAAT |
| (SEQ ID NO: 260) | |
| 1595 | CAACCTGGTGATTTGGGGAAG |
| (SEQ ID NO: 261) | |
| 1597 | GAATGATGGCAGATTGGGCA |
| (SEQ ID NO: 262) | |
| 1598 | TATTGTGGGGCTGTCTCGAATG |
| (SEQ ID NO: 263) | |
| 1624 | CCCTCATGTTGTCTAACGG |
| (SEQ ID NO: 264) | |
| 1633 | TCCGTCACTGGATTCAATGCCATC |
| (SEQ ID NO: 265) | |
| 1634 | TTCGCCAGGGAGCTGGTGAA |
| (SEQ ID NO: 266) | |
| 1798 | GCAAATTAAAGCCTTCGAGCG |
| (SEQ ID NO: 267) | |
| 1926 | TTTTTGTCGACGGATCCAGTTTATCATTATCAATACTCG |
| (SEQ ID NO: 268) | |
| 1927 | TTTTGCGGCCGCAGATCTCTCGAGTCGAAACTAAGTTCTGGTGTT |
| (SEQ ID NO: 269) | |
| 2091 | CTTTTCTTCCCTTGTCTCAATC |
| (SEQ ID NO: 270) | |
| 2352 | GACTCGACCTAGGTTATTTAGTAAAATCAATGACCATTC |
| (SEQ ID NO: 271) | |
| 2353 | CTAAATAACCTAGGTCGAGTCATGTAATTAGTTATGTC |
| (SEQ ID NO: 272) | |
| KARIpETfor | ATTCATATGGCGAATTATTTCAACACTCTG |
| (SEQ ID NO: 273) | |
| KARIpETrev | TAATCTCGAGGCCAGCCACCGCGATGCG |
| (SEQ ID NO: 274) | |
| pETup | ATGCGTCCGGCGTAGA |
| (SEQ ID NO: 275) | |
| seq_ilvC_pGV | GCGGCCGCGTCGACGAGGAGACAACATTATGGCGA |
| (SEQ ID NO: 276) | |
| pGV1994ep_for | CGGTCTTCAATTTCTCAAGTTTCAGTTTCATTTTTCTTGTTCTATTACAAC |
| (SEQ ID NO: 277) | |
| pGV1994ep_rev | CTAACTCCTTCCTTTTCGGTTAGAGCGGATGTGGG |
| (SEQ ID NO: 278) | |
| Not_in_for | CCTCTA GAAATAATTTGCGGCCGCGTTAAGAAGGAGATATACATATG |
| (SEQ ID NO: 279) | |
| AvrII_in_rev | CCGAACGCCCTAGGTCAGTGGTGGTGGTGGTGGTGCTCGAG |
| (SEQ ID NO: 280) | |
| R68DK69Lfor | TAGCTATGCGCTGGACCTGGAGGCTATC |
| (SEQ ID NO: 281) | |
| R68DK69Lrev | GATAGCCTCCAGGTCCAGCGCATAGCTA |
| (SEQ ID NO: 282) | |
| K75VR76Dfor | AGGCTATCGCGGAAGTTGACGCTAGCTG |
| (SEQ ID NO: 283) | |
| K75VR76Drev | CAGCTAGCGTCAACTTCCGCGATAGCCT |
| (SEQ ID NO: 284) | |
| R69NNKfor | TAGCTATGCGCTGCGCNNKGAGGCTATC |
| (SEQ ID NO: 285) | |
| R69NNKrev | GATAGCCTCMNNGCGCAGCGCATAGCTA |
| (SEQ ID NO: 286) | |
| K75NNKfor | AGGCTATCGCGGAANNKCGTGCTAGCTG |
| (SEQ ID NO: 287) | |
| K75NNKrev | CAGCTAGCACGMNNTTCCGCGATAGCCT |
| (SEQ ID NO: 288) | |
| R76NNKfor | AGGCTATCGCGGAAAAANNKGCTAGCTGGC |
| (SEQ ID NO: 289) | |
| R76NNKrev | GCCAGCTAGCMNNTTTTTCCGCGATAGCCT |
| (SEQ ID NO: 290) | |
| R68NNK_for | TAGCTATGCGCTGNNKAAGGAGGCTATC |
| (SEQ ID NO: 291) | |
| R68NNK_rev | GATAGCCTCCTTMNNCAGCGCATAGCTA |
| (SEQ ID NO: 292) | |
| S78NNK_for | GCGGAAAAACGTGCTNNKTGGCGCAAGGCTACT |
| (SEQ ID NO: 293) | |
| 578NNK_rev | AGTAGCCTTGCGCCAMNNAGCACGTTTTTCCGC |
| (SEQ ID NO: 294) | |
| A71NNK_for | GCGCTGCGCAAGGAGNNKATCGCGGAAAAAC |
| (SEQ ID NO: 295) | |
| A71NNK_rev | GTTTTTCCGCGATMNNCTCCTTGCGCAGCGC |
| (SEQ ID NO: 296) | |
| Gln110NNK_for | CTGACCCCAGATAAANNKCATAGCGACGTTG |
| (SEQ ID NO: 297) | |
| Gln110NNK_rev | CAACGTCGCTATGMNNTTTATCTGGGGTCAG |
| (SEQ ID NO: 298) | |
| seq_ilvC_pGV | GCGGCCGCGTCGACGAGGAGACAACATTATGGCGA |
| (SEQ ID NO: 299) | |
| Q110Qfor | GACCCCAGATAAACAACATAGCGACGTTGTT |
| (SEQ ID NO: 300) | |
| Q110Qrev | AACAACGTCGCTATGTTGTTTATCTGGGGTC |
| (SEQ ID NO: 301) | |
| Q110Afor | GACCCCAGATAAAGCACATAGCGACGTTGTT |
| (SEQ ID NO: 302) | |
| Q110Arev | AACAACGTCGCTATGTGCTTTATCTGGGGTC |
| (SEQ ID NO: 303) | |
| Q110Vfor | GACCCCAGATAAAGTACATAGCGACGTTGTT |
| (SEQ ID NO: 304) | |
| Q110Vrev | AACAACGTCGCTATGTACTTTATCTGGGGTC |
| (SEQ ID NO: 305) | |
| R68A71recombfor | GCTATGCGCTGCKAAAGGAGDCAATCGCGG |
| (SEQ ID NO: 306) | |
| R68A71recombrev | CCGCGATTGHCTCCTTTMGCAGCGCATAGC |
| (SEQ ID NO: 307) | |
| R76S78recombfor | GAAAAACGTGCTAGCTGGCGCAAGGCTACT |
| (SEQ ID NO: 308) | |
| R76S78recombrev | AGTAGCCTTGCGCCAGCTAGCACGTTTTTC |
| (SEQ ID NO: 309) | |
| G76S78recombfor | GAAAAAGGTGCTAGCTGGCGCAAGGCTACT |
| (SEQ ID NO: 310) | |
| G76S78recombrev | AGTAGCCTTGCGCCAGCTAGCACCTTTTTC |
| (SEQ ID NO: 311) | |
| S76S78recombfor | GAAAAAAGTGCTAGCTGGCGCAAGGCTACT |
| (SEQ ID NO: 312) | |
| S76S78recombrev | AGTAGCCTTGCGCCAGCTAGCACTTTTTTC |
| (SEQ ID NO: 313) | |
| T76S78recombfor | GAAAAAACTGCTAGCTGGCGCAAGGCTACT |
| (SEQ ID NO: 314) | |
| T76S78recombrev | AGTAGCCTTGCGCCAGCTAGCAGTTTTTTC |
| (SEQ ID NO: 315) | |
| D76S78recombfor | GAAAAAGATGCTAGCTGGCGCAAGGCTACT |
| (SEQ ID NO: 316) | |
| D76S78recombrev | AGTAGCCTTGCGCCAGCTAGCATCTTTTTC |
| (SEQ ID NO: 317) | |
| R76D78recombfor | GAAAAACGTGCTGACTGGCGCAAGGCTACT |
| (SEQ ID NO: 318) | |
| R76D78recombrev | AGTAGCCTTGCGCCAGTCAGCACGTTTTTC |
| (SEQ ID NO: 319) | |
| G76D78recombfor | GAAAAAGGTGCTGACTGGCGCAAGGCTACT |
| (SEQ ID NO: 320) | |
| G76D78recombrev | AGTAGCCTTGCGCCAGTCAGCACCTTTTTC |
| (SEQ ID NO: 321) | |
| S76D78recombfor | GAAAAAAGTGCTGACTGGCGCAAGGCTACT |
| (SEQ ID NO: 322) | |
| S76D78recombrev | AGTAGCCTTGCGCCAGTCAGCACTTTTTTC |
| (SEQ ID NO: 323) | |
| T76D78recombfor | GAAAAAACTGCTGACTGGCGCAAGGCTACT |
| (SEQ ID NO: 324) | |
| T76D78recombrev | AGTAGCCTTGCGCCAGTCAGCAGTTTTTTC |
| (SEQ ID NO: 325) | |
| D76D78recombfor | GAAAAAGATGCTGACTGGCGCAAGGCTACT |
| (SEQ ID NO: 326) | |
| D76D78recombrev | AGTAGCCTTGCGCCAGTCAGCATCTTTTTC |
| (SEQ ID NO: 327) | |
| 1994hisrev | TGACTCGAGCGGCCGCGGATCCTTAGTGGTGGTGGTGGTGGTGTCCTGCCA |
| (SEQ ID NO: 328) | CTGCA |
| pGV1994ep_for | CGGTCTTCAATTTCTCAAGTTTCAGTTTCATTTTTCTTGTTCTATTACAAC |
| (SEQ ID NO: 329) | |
| pGV1994ep_rev | CTAACTCCTTCCTTTTCGGTTAGAGCGGATGTGGG |
| (SEQ ID NO: 330) | |

### Example 1

### Low-Level Anaerobic Production of Isobutanol

[0484] This example illustrates that a modified microorganism which is engineered to overexpress an isobutanol producing pathway produces a low amount of isobutanol under anaerobic conditions.

[0485] Overnight cultures of GEVO1859 were started from glycerol stocks stored at −80° C. of previously transformed strains. These cultures were started in 3 mL M9 minimal medium (Miller, J.H. A Short Course in Bacterial Genetics: A laboratory manual and handbook for Escherichia coli and related bacteria. 1992. Cold Spring Harbor Laboratory Press, Cold Spring Harbor, N.Y.), supplemented with 10 g/L yeast extract, 10 μM ferric citrate and trace metals, containing 8.5% glucose and the appropriate antibiotics in snap cap tubes about 14 h prior to the start of the fermentation. Isobutanol fermentations were then carried out in screw cap flasks containing 20 mL of the same medium that was inoculated with 0.2 mL of the overnight culture. The cells were incubated at 37° C./250 rpm until the strains had grown to an OD₆₀₀ of 0.6-0.8 and were then induced with Isopropyl β-D-1-thiogalactopyranoside at 1 mM final concentration.

[0486] Three hours after induction the cultures were either kept under the current conditions (micro-aerobic conditions) or shifted to anaerobic conditions by loosening the cap of the flasks and placing the flasks into to a Coy Laboratory Products Type B Vinyl anaerobic chamber (Coy Laboratory Products, Grass Lakes, Mich.) through an airlock in which the flasks were cycled three times with nitrogen and vacuum, and then filled with the a hydrogen gas mix (95% Nitrogen, 5% Hydrogen).

[0487] Once the flasks were inside the anaerobic chamber, the flasks were closed again and incubated without shaking at 30° C. The flasks in the anaerobic chamber were swirled twice a day. Samples (2 mL) were taken at the time of the shift and at 24 h and 48 h after inoculation, spun down at 22,000 g for 1 min to separate the cell pellet from the supernatant and stored frozen at −20° C. until analysis. The samples were analyzed using High performance liquid chromatography (HPLC) and gas chromatography (GC).

[0488] GEVO1859 was run in triplicate. Stable OD values can be observed for all strains under anaerobic shift conditions over the course of the fermentation (FIG. 8). The complete pathway integrant strain showed low-level anaerobic isobutanol production over the course of the fermentation (FIG. 9, Table 7).

TABLE 7
Volumetric productivity, specific productivity titer and yield
reached in an anaerobic fermentation for the tested strains
and plasmid systems

| | | | Specific | | | | | |
|---|---|---|---|---|---|---|---|---|
| | | | Productivity | | | | | |
| | Volumetric | | [g/L/ | | | | | |
| | Productivity | | h/ | | Titer | | Yield | |
| Samples | [g/L/h] | ± | OD] | ± | [g/L] | ± | [g/g] | ± |
| GEVO1859 | 0.088 | 0.028 | 0.019 | 0.005 | 4.22 | 1.35 | 0.140 | 0.029 |

[0489] In the period from 6 h to 48 h, i.e. under anaerobic conditions GEVO1859 demonstrated limited production of isobutanol (Table 8).

TABLE 8
Volumetric productivity, specific productivity titer and yield reached in the
period from 6 to 48 h for the tested strain

| | | Volumetric | | Specific | | | | | |
|---|---|---|---|---|---|---|---|---|---|
| | | Productivity | | Productivity | | Titer | | Yield | |
| Samples | Condition | [g/L/h] | ± | [g/L/h/OD] | ± | [g/L] | ± | [g/g] | ± |
| GEVO1859 | Micro- | 0.266 | 0.010 | 0.040 | 0.004 | 11.2 | 0.4 | 0.33 | 0.016 |
| | aerobic | | | | | | | | |
| GEVO1859 | Anaerobic | 0.086 | 0.026 | 0.019 | 0.005 | 3.60 | 1.1 | 0.14 | 0.032 |

### Example 2

### Determination of Transhydrogenase Activity

[0490] This example illustrates that an isobutanol producing microorganism which carries a plasmid for the expression of the E. coli PntAB transhydrogenase (SEQ ID NO: 2 and SEQ ID NO: 4) contains increased transhydrogenase activity.

[0491] A fermentation was performed with a strain expressing the tet repressor (GEVO1385) and carrying the plasmids pGV1655 (SEQ ID NO: 109) and pGV1698 (SEQ ID NO: 112) for expression of the isobutanol pathway. The E. coli transhydrogenase PntAB was expressed from a third plasmid pGV1685 (SEQ ID NO: 111), which contained the E. coli pntAB genes under control of the PLtet promoter. The appropriate empty vector control carries the plasmid pGV1490 (SEQ ID NO: 104).

[0492] GEVO1385 was transformed with pGV1698, pGV1655, and either pGV1685 or pGV1490. Transformed cells were plated on LB-plates containing the appropriate antibiotics and the plates were incubated overnight at 37° C. Overnight cultures were started in 3 mL EZ-Rich Defined Medium (Neidhardt, F. C., P. L. Bloch, and D. F. Smith. 1974, Culture medium for enterobacteria, J. Bacteriol. 119:736-47) containing 5% glucose and the appropriate antibiotics in snap cap tubes about 14 h prior to the start of the fermentation. Isobutanol fermentations were then carried out in EZ-Rich containing 5% glucose and the appropriate antibiotics. 250 mL screw cap flasks with 20 mL EZ-Rich containing 5% glucose and the appropriate antibiotics were inoculated with 1% of the grown overnight culture. The cells were incubated at 37° C./250 rpm until the strains were grown to an OD₆₀₀ of 0.6-0.8 and these strains were then induced with Isopropyl β-D-1-thiogalactopyranoside (IPTG (Gold BioTechnology, Inc, I2481C100) 1 mM) and anhydrotetracycline (aTc (Sigma, 37919-100 mg) 100 ng/mL). Samples were taken of the medium 48 h after inoculation. 15 mL of cell culture from each flask were centrifuged at 5,000×g for 5 min to separate the cell pellet from the supernatant. The cell pellets were stored frozen at −80° C. until analysis. The cultures grew to a comparable OD in this experiment.

[0493] To confirm that the transhydrogenase was actually expressed from the plasmids and to assess their enzymatic activity levels, enzyme assays were done with lysates prepared from the fermentation cultures. Frozen cell pellets were thawed on ice. The pellets were resuspended in 1.2 mL lysis buffer (50 mM potassium phosphate buffer at pH 7.5, MgCl₂ 2 mM). The suspensions were sonicated on ice for twice 2 min. The transhydrogenase enzyme assay was done in potassium phosphate buffer (50 mM pH 7.5, MgCl₂ 2 mM, 1 mM acetylpyridine-AD, 0.5 mM NADPH). The assay was run at 25° C. in a 96 well plate. Absorbance at 375 nm was followed in a kinetic assay format. To measure PntAB activity lysates were not cleared by centrifugation. The activity obtained for the samples featuring over-expressed E. coli pntAB show at least a 10 fold increase in transhydrogenase activity (Table 9).

TABLE 9
Shown are the enzymatic activities of the independent E. coli pntAB
overexpressing strains and the amount of isobutanol production that would
be supported by that activity calculated from Vₘₐₓ values obtained from
the enzyme assay

| | | | | | specific activity |
|---|---|---|---|---|---|
| | | | protein | | [u/mg |
| | average | stdev. | conc. | units in | (total cell |
| Samples | Vmax | Vmax | [mg/mL] | reaction | protein)] |
| pntAB-1 | 33.81 | 3.87 | 1.17 | 0.0010 | 0.1646 |
| pntAB-2 | 45.06 | 1.51 | 1.89 | 0.0013 | 0.1355 |
| empty vector-1 | 2.24 | 0.21 | 0.89 | 0.0001 | 0.0142 |
| empty vector-2 | −0.01 | 2.00 | 0.71 | 0.0000 | −0.0001 |

### Example 3

### Overexpression of pntAB Improves Isobutanol Fermentation Performance

[0494] This example illustrates that overexpression of a transhydrogenase, exemplified by the E. coli pntAB operon (SEQ ID NO: 1 and SEQ ID NO: 3) on a low copy plasmid improves isobutanol production under micro-aerobic conditions.

[0495] GEVO1748 was transformed with plasmids pGV1698 (SEQ ID NO: 112) and one of either pGV1720 (SEQ ID NO: 115) (control) or pGV1745 (SEQ ID NO: 117) (E. coli pntAB).

[0496] The aforementioned strains were plated on LB-plates containing the appropriate antibiotics and incubated overnight at 37° C. Overnight cultures were started in 3 mL EZ-Rich medium (Neidhardt, F. C., P. L. Bloch, and D. F. Smith. 1974. Culture medium for enterobacteria. J. Bacteriol. 119:736-47) containing 5% glucose and the appropriate antibiotics in snap cap tubes about 14 h prior to the start of the fermentation. Isobutanol fermentations were then carried out in EZ-Rich Medium containing 5% glucose and the appropriate antibiotics. 250 mL screw cap flasks with 20 mL EZ-Rich medium containing 5% glucose and the appropriate antibiotics were inoculated with 1% of the grown overnight culture. The cells were incubated at 37° C./250 rpm until they reached an OD₆₀₀ of 0.6-0.8 followed by induction with Isopropyl β-D-1-thiogalactopyranoside (IPTG, 1 mM) and anhydrotetracycline (aTc, 100 ng/mL). Samples (2 mL) were taken 24 h and 48 h post inoculation, centrifuged at 22,000×g for 1 min and stored frozen at −20° C. until via Gas Chromatography (GC) and High Performance Liquid Chromatography (HPLC). Fermentations were run with two biological replicates.

[0497] All cultures grew to an OD of 5.5 to 6.5. Volumetric productivity and titer were improved by 45%, specific productivity even by 51%. Yield was improved by 8% (Table 10).

TABLE 10
Overexpression of E. coli pntAB improves isobutanol fermentation
performance

| | Volumetric | | Specific | | | | | |
|---|---|---|---|---|---|---|---|---|
| | Productivity | | Productivity | | Titer | | Yield | |
| Strain | [g/L/h] | ± | [g/L/h/OD] | ± | [g/L] | ± | [g/g] | ± |
| GEVO1748 + | 0.205 | 0.001 | 0.035 | 0.001 | 9.86 | 0.04 | 0.311 | 0.001 |
| pGV1698 + | | | | | | | | |
| pGV1720 | | | | | | | | |
| GEVO1748 + | 0.298 | 0.006 | 0.053 | 0.003 | 14.29 | 0.28 | 0.337 | 0.001 |
| pGV1698 + | | | | | | | | |
| pGV1745 | | | | | | | | |

### Example 4

### Overexpression of pntAB Enables Anaerobic Isobutanol Production

[0498] This example illustrates that overexpression of a transhydrogenase, exemplified by the E. coli pntAB operon product (SEQ ID NO: 2 and SEQ ID NO: 4), improves anaerobic isobutanol production. This is surprising because it was previously not known that isobutanol could be produced anaerobically. In addition, this result was achieved without modifying the isobutanol biosynthetic pathway itself.

[0499] GEVO1748 was transformed with plasmids pGV1698 (SEQ ID NO: 112) and pGV1720 (SEQ ID NO: 115) (control) or pGV1745 (SEQ ID NO: 117) (E. coli pntAB).

[0500] Overnight cultures of the aforementioned strains were started from glycerol stocks stored at −80° C. of previously transformed strains. These cultures were started in 3 mL M9 minimal medium (Miller, J.H. A Short Course in Bacterial Genetics: A laboratory manual and handbook for Escherichia coli and related bacteria. 1992. Cold Spring Harbor Laboratory Press, Cold Spring Harbor, N.Y.), supplemented with 10 g/L yeast extract, 10 μM ferric citrate and trace metals, containing 8.5% glucose and the appropriate antibiotics in snap cap tubes about 14 h prior to the start of the fermentation. Isobutanol fermentations were then carried out in 250 mL screw cap flasks containing 20 mL of the same medium that was inoculated with 0.2 mL of the overnight culture. The cells were incubated at 37° C./250 rpm until the strains had grown to an OD₆₀₀ of 0.6-0.8 and were then induced with Isopropyl β-D-1-thiogalactopyranoside at 1 mM final concentration.

[0501] Three hours after induction the cultures were shifted to anaerobic fermentation conditions by loosening the cap of the flasks and placing the flasks into to a Coy Laboratory Products Type B Vinyl anaerobic chamber (Coy Laboratory Products, Grass Lakes, Mich.) through an airlock in which the flasks were cycled three times with nitrogen and vacuum, and then filled with the a hydrogen gas mix (95% Nitrogen, 5% Hydrogen). Once the flasks were inside the anaerobic chamber, the flasks were closed again and incubated without shaking at 30° C. Inside the chamber, an anaerobic atmosphere (<5 ppm oxygen) was maintained through the hydrogen gas mix (95% Nitrogen, 5% Hydrogen) reacting with a palladium catalyst to remove oxygen. The flasks in the anaerobic chamber were swirled twice a day. Samples (2 mL) were taken at the time of the shift and at 24 h and 48 h after inoculation, spun down at 22,000×g for 1 min to separate the cell pellet from the supernatant and stored frozen at −20° C. until analysis. The samples were analyzed using High performance liquid chromatography (HPLC) and gas chromatography (GC). All experiments for the E. coli pntAB-expressing strain were performed in duplicate while the control strain was only run in a single experiment.

[0502] At the time of shifting the cultures to anaerobic conditions all samples had an OD₆₀₀ ranging between 2.3 and 3.3. All samples featuring an overexpressed E. coli pntAB operon (pGV1745) increased in OD₆₀₀ from 6 h to 24 h by 0.2-1.1, all samples lacking pntAB (pGV1720) decreased in OD₆₀₀ by 0.5-1.2 (FIG. 10), indicating that overexpression of E. coli pntAB is beneficial under anaerobic conditions.

[0503] Furthermore, pntAB over-expression is beneficial for anaerobic isobutanol production. All samples featuring E. coli PntAB continued isobutanol production under anaerobic conditions until the fermentation was stopped at 48 hours whereas the samples lacking E. coli PntAB did not produce isobutanol between 24 and 48 hours (FIG. 11)

[0504] In the strain overexpressing E. coli pntAB, volumetric productivity and titer are increased 2.4-fold, specific productivity by 85% and yield by 9% (Table 11).

TABLE 11
Shown are the results for volumetric productivity, specific productivity titer
and yield reached in an anaerobic fermentation for the tested strains and plasmid
systems after 48 h

| | Volumetric | | Specific | | | | | |
|---|---|---|---|---|---|---|---|---|
| | Productivity | | Productivity | | Titer | | Yield | |
| Samples | [g/L/h] | ± | [g/L/h/OD] | ± | [g/L] | ± | [g/g] | ± |
| GEVO1748 + | 0.047 | | 0.022 | | 2.24 | | 0.279 | |
| pGV1720 + | | | | | | | | |
| pGV1698 | | | | | | | | |
| GEVO1748 + | 0.111 | 0.002 | 0.041 | 0.012 | 5.32 | 0.10 | 0.304 | 0.004 |
| pGV1745 + | | | | | | | | |
| pGV1698 | | | | | | | | |

[0505] In the period from 6 h to 48 h, (i.e. under anaerobic conditions), GEVO1748 transformed with plasmids pGV1698 and pGV1745 (carrying E. coli pntAB) demonstrated significantly higher productivity, titer, and yield of isobutanol compared to the control strain carrying pGV1720 (without E. coli pntAB) (Table 12).

TABLE 12
Shown are the results for volumetric productivity, specific productivity titer
and yield reached in the period from 6 to 48 h for the tested strains and plasmid
systems

| | Volumetric | | Specific | | | | | |
|---|---|---|---|---|---|---|---|---|
| | Productivity | | Productivity | | Titer | | Yield | |
| samples | [g/L/h] | ± | [g/L/h/OD] | ± | [g/L] | ± | [g/g] | ± |
| GEVO1748 + | 0.029 | | 0.014 | | 1.21 | | 0.171 | |
| pGV1720 + | | | | | | | | |
| pGV1698 | | | | | | | | |
| GEVO1748 + | 0.096 | 0.003 | 0.035 | 0.015 | 4.01 | 0.15 | 0.246 | 0.002 |
| pGV1745 + | | | | | | | | |
| pGV1698 | | | | | | | | |

### Example 5

### Chromosomal Integration of pntAB Improves Anaerobic Isobutanol Production

[0506] This example illustrates that overexpression of a transhydrogenase, exemplified by the E. coli pntAB operon product (SEQ ID NO: 2 and SEQ ID NO: 4), from the chromosome improves isobutanol production under anaerobic conditions compared to the case in which E. coli pntAB is expressed from a low copy plasmid. This strain reaches the same titer aerobically as anaerobically.

[0507] Overnight cultures of GEVO1846, GEVO1859, GEVO1886 were started from glycerol stocks stored at −80° C. of previously transformed strains. These cultures were started in 3 mL M9 minimal medium (Miller, J.H. A Short Course in Bacterial Genetics: A laboratory manual and handbook for Escherichia coli and related bacteria. 1992. Cold Spring Harbor Laboratory Press, Cold Spring Harbor, N.Y.), supplemented with 10 g/L yeast extract, 10 μM ferric citrate and trace metals, containing 8.5% glucose and the appropriate antibiotics in snap cap tubes about 14 h prior to the start of the fermentation. Isobutanol fermentations were then carried out in screw cap flasks containing 20 mL of the same medium that was inoculated with 0.2 mL of the overnight culture. The cells were incubated at 37° C./250 rpm until the strains had grown to an OD₆₀₀ of 0.6-0.8 and were then induced with Isopropyl β-D-1-thiogalactopyranoside at 1 mM final concentration.

[0508] Three hours after induction the cultures were either kept under the current conditions (micro-aerobic conditions) or shifted to anaerobic conditions by loosening the cap of the flasks and placing the flasks into to a Coy Laboratory Products Type B Vinyl anaerobic chamber (Coy Laboratory Products, Grass Lakes, Mich.) through an airlock in which the flasks were cycled three times with nitrogen and vacuum, and then filled with the a hydrogen gas mix (95% Nitrogen, 5% Hydrogen). Once the flasks were inside the anaerobic chamber, the flasks were closed again and incubated without shaking at 30° C. The flasks in the anaerobic chamber were swirled twice a day. Samples (2 mL) were taken at the time of the shift and at 24 h and 48 h after inoculation, spun down at 22,000×g for 1 min to separate the cell pellet from the supernatant and stored frozen at −20° C. until analysis. The samples were analyzed using High performance liquid chromatography (HPLC) and gas chromatography (GC). All experiments were performed in duplicate.

[0509] GEVO1886, GEVO1859 and GEVO1846 were run in parallel. Each strain was run in triplicate. Stable OD values can be observed for all strains under anaerobic shift conditions over the course of the fermentation (FIG. 12). The over-expression of E. coli pntAB in the complete pathway integrant strain again showed improvement for isobutanol production over the course of the fermentation (FIG. 13).

[0510] Compared to the complete pathway integrant strain without E. coli pntAB knock-in (GEVO1859), volumetric productivity and titer are increased 3.8-fold, specific productivity is increased 2.8-fold and the yield is 2.2-fold higher in GEVO1886. In addition, GEVO1886 shows superior performance compared to the plasmid system strain (GEVO1846) under anaerobic conditions. Volumetric productivity and titer are increased by 48%, specific productivity is increased by 18% and yield is 12% higher (Table 13).

TABLE 13
Shown are the results for volumetric productivity, specific
productivity titer and yield reached in an anaerobic fermentation
for the tested strains and plasmid systems

| | | | Specific | | | | | |
|---|---|---|---|---|---|---|---|---|
| | | | Productivity | | | | | |
| | Volumetric | | [g/L/ | | | | | |
| | Productivity | | h/ | | Titer | | Yield | |
| Samples | [g/L/h] | ± | OD] | ± | [g/L] | ± | [g/g] | ± |
| GEVO1886 | 0.335 | 0.002 | 0.053 | 0.001 | 16.08 | 0.08 | 0.307 | 0.004 |
| GEVO1859 | 0.088 | 0.028 | 0.019 | 0.005 | 4.22 | 1.35 | 0.140 | 0.029 |
| GEVO1846 | 0.227 | 0.021 | 0.045 | 0.005 | 10.88 | 1.01 | 0.274 | 0.003 |

[0511] The performance numbers in the period from 6 to 48 demonstrate that most of isobutanol production occurred under anaerobic conditions. Highest values for yield and specific productivity were reached by the strain featuring the complete pathway integration and the E. coli pntAB knock-in (GEVO1886) under anaerobic conditions. In addition this strain reached the highest values for volumetric productivity and titer under both conditions anaerobic and micro-aerobic (Table 14).

TABLE 14
Shown are the results for volumetric productivity, specific productivity titer
and yield reached in the period from 6 to 48 h for the tested strains and plasmid
systems

| | | Volumetric | | Specific | | | | | |
|---|---|---|---|---|---|---|---|---|---|
| | | Productivity | | Productivity | | Titer | | Yield | |
| Samples | Condition | [g/L/h] | ± | [g/L/h/OD] | ± | [g/L] | ± | [g/g] | ± |
| GEVO1886 | Micro- | 0.355 | 0.004 | 0.042 | 0.001 | 14.9 | 0.2 | 0.33 | 0.012 |
| | aerobic | | | | | | | | |
| GEVO1859 | Micro- | 0.266 | 0.010 | 0.040 | 0.004 | 11.2 | 0.4 | 0.33 | 0.016 |
| | aerobic | | | | | | | | |
| GEVO1846 | Micro- | 0.344 | 0.007 | 0.051 | 0.004 | 14.4 | 0.3 | 0.33 | 0.005 |
| | aerobic | | | | | | | | |
| GEVO1886 | Anaerobic | 0.355 | 0.008 | 0.056 | 0.001 | 14.9 | 0.1 | 0.35 | 0.004 |
| GEVO1859 | Anaerobic | 0.086 | 0.026 | 0.019 | 0.005 | 3.60 | 1.1 | 0.14 | 0.032 |
| GEVO1846 | Anaerobic | 0.209 | 0.019 | 0.041 | 0.004 | 8.79 | 0.8 | 0.27 | 0.006 |

[0512] The performance numbers in the period from 6 to 48 demonstrate that most of isobutanol production occurred under anaerobic conditions. Highest values for yield and specific productivity were reached by the strain featuring the complete pathway integration and the E. coli pntAB knock-in (GEVO1886) under anaerobic conditions.

### Example 6

### Anaerobic Batch Fermentation of GEVO1886 and GEVO1859

[0513] This example illustrates that an engineered microorganism which overexpresses a transhydrogenase, exemplified by the E. coli pntAB gene product (SEQ ID NO: 2 and SEQ ID NO: 4), from the chromosome produces isobutanol at a higher rate, titer and productivity compared to the a strain that does not overexpress a transhydrogenase. This is surprising because the increase in rate, titer, and productivity was achieved without modifying the isobutanol biosynthetic pathway itself.

[0514] Overnight cultures were started in 250 mL Erlenmeyer flasks with strain GEVO1886 and strain GEVO1859 cells from fresh streak plates with a 40 mL volume of M9 medium (Miller, J.H. A Short Course in Bacterial Genetics: A laboratory manual and handbook for Escherichia coli and related bacteria. 1992. Cold Spring Harbor Laboratory Press, Cold Spring Harbor, N.Y.) containing 85 g/L glucose, 20 g/L yeast extract, 20 μM ferric citrate, trace metals, an additional 1 g/L NH₄Cl, an additional 1 mM MgSO₄ and an additional 1 mM CaCl₂ and at a culture OD₆₀₀ of 0.02 to 0.05. The overnight cultures were grown for approximately 14 hours at 30° C. at 250 rpm.

[0515] Some of the overnight cultures were then transferred to 400 mL DasGip fermenter vessels containing about 200 mL of M9 medium (Miller, J.H. A Short Course in Bacterial Genetics: A laboratory manual and handbook for Escherichia coli and related bacteria. 1992. Cold Spring Harbor Laboratory Press, Cold Spring Harbor, N.Y.) containing 85 g/L glucose, 20 g/L yeast extract, 20 μM ferric citrate, trace metals, an additional 1 g/L NH₄Cl, an additional 1 mM MgSO₄ and an additional 1 mM CaCl₂ to achieve a starting cell concentration by optical density at 600 nm of 0.1. The vessels were attached to a computer control system to monitor and control pH at 6.5 through addition of base, temperature at 30° C., dissolved oxygen, and agitation. The vessels were agitated, with a minimum agitation of 200 rpm and agitation was varied to maintain a dissolved oxygen content of about 50% using a 12 sL/h air sparge until the OD₆₀₀ was about 1.0. The vessels were then induced with 1 mM IPTG.

[0516] After continuing growth for 3 hrs, the dissolved oxygen content was decreased to 0% with 200 rpm agitation and 2.5 sL/h sparge with nitrogen (N₂) gas. Measurement of the fermenter vessel off-gas for isobutanol and ethanol was performed throughout the experiment by passage of the off-gas stream through a mass spectrometer. Continuous measurement of off-gas concentrations of carbon dioxide and oxygen were also measured by a DasGip off-gas analyzer throughout the experiment. Samples were aseptically removed from the fermenter vessel throughout the experiment and used to measure OD₆₀₀, glucose concentration by HPLC, and isobutanol concentration in the broth by GC. Each strain was run in three independent fermentations.

[0517] Strain GEVO1886 reached an average isobutanol total titer of 21.6 g/L. The average yield of the fermentation, calculated when the titer of isobutanol was between 1 g/L and 15 g/L, was 88% of theoretical. The average productivity of the fermentation was 0.4 g/L/h. As described in Example 5, GEVO1886 performs at least equally well in terms of isobutanol productivity, titer, yield under anaerobic and aerobic conditions.

[0518] By comparison, strain GEVO1859 reached an average isobutanol total titer of 1.8 g/L. The average yield of the fermentation was 56% of theoretical, and the average productivity of the fermentation was 0.02 g/l/h.

### Example 7

### PntAB Overexpression Rescues a zwf-Deletion Phenotype

[0519] This example illustrates that a strain that has a growth defect and does not produce isobutanol because of the deletion in a native pathway that reduces the strains ability to produce the redox cofactor NADPH can surprisingly be rescued by overexpression of E. coli pntAB.

[0520] Overnight cultures of GEVO1399 transformed with plasmids pSA55, pGV1609 (SEQ ID NO: 108), and pGV1745 (SEQ ID NO: 117) and GEVO1399 transformed with plasmids pSA55, pGV1609, and pGV1720 (SEQ ID NO: 115) were started from glycerol stock cultures stored at −80° C. in 3 mL fermentation medium (M9 minimal medium according to Miller (Miller, J.H. A Short Course in Bacterial Genetics: A laboratory manual and handbook for Escherichia coli and related bacteria. 1992. Cold Spring Harbor Laboratory Press, Cold Spring Harbor, N.Y.), supplemented with 10 g/L yeast extract, 10 μM ferric citrate and trace metals) containing 8.5% glucose and the appropriate antibiotics in snap cap tubes about 14 h prior to the start of the fermentation.

[0521] Isobutanol fermentations were then carried out in fermentation medium containing 8.5% glucose and the appropriate antibiotics. Two 250 mL screw cap flasks with 20 mL fermentation medium containing 8.5% glucose and the appropriate antibiotics were inoculated with 1% of each grown overnight culture. The cells were incubated at 37° C./250 rpm until the strains were grown to an OD₆₀₀ of 0.6-0.8 and were then induced with Isopropyl β-D-1-thiogalactopyranoside at 1 mM final concentration. Three hours after induction one flask per overnight culture was shifted to anaerobic fermentation conditions. This was done by loosening the cap of the flasks and introducing the flasks into the anaerobic chamber. Once the flasks were flushed with oxygen free atmosphere (while going through the airlock), the flasks were closed again and incubated without shaking at 30° C. in the anaerobic chamber. The flasks in the anaerobic chamber were swirled twice a day. Samples were taken from the medium at the time of the shift and at 24 h and 48 h after inoculation, spun down at 22,000×g for 1 min to separate the cell pellet from the supernatant and stored frozen at −20° C. until analysis. The samples were analyzed using High performance liquid chromatography (HPLC) and gas chromatography (GC).

[0522] The strain lacking zwf without E. coli pntAB grew to an OD of about 3, whereas the samples featuring E. coli pntAB reached OD values of about 5-6. This OD was not significantly different from normal growth and thus the over-expression of E. coli pntAB rescues the zwf growth phenotype (FIG. 14).

[0523] Isobutanol production was rescued under micro-aerobic conditions by the overexpression of E. coli pntAB. Volumetric productivity and titer are improved 7.4 fold, specific productivity was improved 3.3 fold and yield 2.5 fold (Table 15).

TABLE 15
Volumetric productivity, specific productivity titer and yield in a micro-
aerobic fermentation for the tested strains and plasmid systems

| | Volumetric | | Specific | | | | | |
|---|---|---|---|---|---|---|---|---|
| | Productivity | | Productivity | | Titer | | Yield | |
| Samples | [g/L/h] | ± | [g/L/h/OD] | ± | [g/L] | ± | [g/g] | ± |
| GEVO1399 + | 0.170 | 0.001 | 0.030 | 0.003 | 8.18 | 0.02 | 0.248 | 0.012 |
| pGV1745 + pSA55 + | | | | | | | | |
| pGV1609 | | | | | | | | |
| GEVO1399 + | 0.023 | 0.004 | 0.009 | 0.002 | 1.10 | 0.18 | 0.100 | 0.013 |
| pGV1720 + pSA55 + | | | | | | | | |
| pGV1609 | | | | | | | | |

[0524] For the anaerobic shift experiment the same trend was observed as under micro-aerobic conditions. Isobutanol production was rescued by the over-expression of E. coli pntAB. Volumetric productivity and titer are improved 3.4 fold, specific productivity was improved 2.1 fold and yield by 43% (Table 16).

TABLE 16
Volumetric productivity, specific productivity titer and yield in an anaerobic
fermentation for the tested strains and plasmid systems

| | Volumetric | | Specific | | | | | |
|---|---|---|---|---|---|---|---|---|
| | Productivity | | Productivity | | Titer | | Yield | |
| Samples | [g/L/h] | ± | [g/L/h/OD] | ± | [g/L] | ± | [g/g] | ± |
| GEVO1399 + | 0.125 | 0.038 | 0.035 | 0.003 | 6.00 | 1.84 | 0.297 | 0.008 |
| pGV1745 + | | | | | | | | |
| pSA55 + pGV1609 | | | | | | | | |
| GEVO1399 + | 0.037 | 0.001 | 0.017 | 0.001 | 1.78 | 0.04 | 0.207 | 0.005 |
| pGV1720 + | | | | | | | | |
| pSA55 + pGV1609 | | | | | | | | |

### Example 8

### sthA Does not Contribute to Improvement in Anaerobic Isobutanol Production

[0525] This example illustrates that an isobutanol production strain with a deletion of the soluble transhydrogenase sthA produces low amounts of isobutanol anaerobically. This shows that the introduction of the sthA deletion does not provide cofactor balance to the isobutanol production strain and does not enable anaerobic isobutanol production above the levels seen for strains without redox engineering. The deletion of sthA has no significant effect on anaerobic performance of a production strain that overexpresses E. coli pntAB.

[0526] GEVO1748 and GEVO1844 were transformed with plasmids pGV1698 (SEQ ID NO: 112) and one of either pGV1720 (SEQ ID NO: 115) (control) or pGV1745 (SEQ ID NO: 117) (E. coli pntAB).

[0527] Overnight cultures of the strains to be tested were started either using fresh transformants (for all combinations featuring strain GEVO1844) or using frozen stocks (all other samples). The cultures were started in 3 mL fermentation medium (M9 minimal medium according to Miller (Miller, J.H. A Short Course in Bacterial Genetics: A laboratory manual and handbook for Escherichia coli and related bacteria. 1992. Cold Spring Harbor Laboratory Press, Cold Spring Harbor, N.Y.), supplemented with 10 g/L yeast extract, 10 μM ferric citrate and trace metals) containing 8.5% glucose and the appropriate antibiotics in snap cap tubes about 14 h prior to the start of the fermentation.

[0528] Isobutanol fermentations were then carried out in fermentation medium containing 8.5% glucose and the appropriate antibiotics. Two 250 mL screw cap flasks with 20 mL fermentation medium containing 8.5% glucose and the appropriate antibiotics were inoculated with 1% of each grown overnight culture. The cells were incubated at 37° C./250 rpm until the strains were grown to an OD₆₀₀ of 0.6-0.8 and were then induced with Isopropyl β-D-1-thiogalactopyranoside at 1 mM final concentration. Three hours after induction the flasks were shifted to anaerobic fermentation conditions. This was done by loosening the cap of the flasks and introducing the flasks into the anaerobic chamber. Once the flasks were flushed with oxygen free atmosphere (while going through the airlock), the flasks were closed again and incubated without shaking at 30° C. in the anaerobic chamber. The flasks in the anaerobic chamber were swirled twice a day. Samples were taken of the medium at the time of the shift and at 24 h and 48 h after inoculation, spun down at 22,000×g for 1 min to separate the cell pellet from the supernatant and stored frozen at −20° C. until analysis. The samples were analyzed using High performance liquid chromatography (HPLC) and gas chromatography (GC).

[0529] Strain GEVO1844 showed similar isobutanol production compared to non redox cofactor engineered strain GEVO1748 (Table 17).

TABLE 17
Shown are the results for volumetric productivity, specific productivity titer
and yield reached in an anaerobic fermentation for the tested strains and
plasmid systems

| | Volumetric | | Specific | | | | | |
|---|---|---|---|---|---|---|---|---|
| | Productivity | | Productivity | | Titer | | Yield | |
| Samples | [g/L/h] | ± | [g/L/h/OD] | ± | [g/L] | ± | [g/g] | ± |
| GEVO1844 + | 0.039 | 0.004 | 0.036 | 0.006 | 1.89 | 0.20 | 0.236 | 0.025 |
| pGV1720 + pGV1698 | | | | | | | | |
| (i.e. ΔsthA without | | | | | | | | |
| PntAB) | | | | | | | | |
| GEVO1748 + | 0.047 | | 0.022 | | 2.24 | | 0.279 | |
| pGV1720 + pGV1698 | | | | | | | | |
| (i.e. Control without | | | | | | | | |
| PntAB) | | | | | | | | |
| GEVO1844 + | 0.127 | 0.004 | 0.033 | 0.002 | 6.11 | 0.19 | 0.310 | 0.007 |
| pGV1745 + pGV1698 | | | | | | | | |
| (i.e. ΔsthA with | | | | | | | | |
| PntAB) | | | | | | | | |
| GEVO1748 + | 0.111 | 0.002 | 0.041 | 0.012 | 5.32 | 0.10 | 0.304 | 0.004 |
| pGV1745 + pGV1698 | | | | | | | | |
| (i.e. control with | | | | | | | | |
| PntAB) | | | | | | | | |

[0530] The strains with the sthA deletion exhibited similar isobutanol production compared to the strains without the sthA deletion. This was independent on the presence or absence of overexpression of E. coli pntAB. It can thus be concluded that the sthA deletion has no significant effect on isobutanol production.

### Example 9

### pntAB in Yeast

[0531] This example illustrates an isobutanol producing yeast which is engineered to express a transhydrogenase.

[0532] Yeast strain, GEVO5001, which is deficient in pyruvate decarboxylase activity and expresses the isobutanol biosynthetic pathway is further engineered to express a transhydrogenase. The E. coli pntA (SEQ ID NO: 1) and pntB (SEQ ID NO: 3) genes are expressed in yeast with the modifications of (1) N-terminal addition of amino acids to target the proteins to the plasma membrane (export signal sequence (ess)) and (2) N-terminal modifications to target the proteins to the mitochondrial outer membrane (mitochondrial targeting sequence (mts)). pGV6002 is a yeast integration plasmid that carries versions of pntA and pntB with modifications to target them to the plasma membrane. pGV6003 is a yeast integration plasmid that carries versions of pntA and pntB with modifications to target them to the mitochondrial outer membrane. In both cases, the pntA and pntB genes are under the control of the strong constitutive promoters from TEF1 and TDH3, respectively. pGV6002 and pGV6003 are linearized and transformed into GEVO5001 to generate GEVO5004 and GEVO5005, respectively. Expression of pntA and pntB is confirmed by qRT-PCR and once confirmed; GEVO5004 and GEVO5005 are used in fermentations for the production of isobutanol.

### Example 10

### Native E. coli Alcohol Dehydrogenase Activity Converts Isobutyraldehyde to Isobutanol

[0533] This example illustrates that native E. coli alcohol dehydrogenase activity converts isobutyraldehyde to isobutanol.

[0534] Strain JCL260 transformed with pGV1631 and pSA69 (strain without S. cerevisiae ADH2) and JCL260 transformed with pSA55 and pSA69 (strain with S. cerevisiae ADH2) were plated onto LB-plates containing the appropriate antibiotics and incubated overnight at 37° C. Plates were taken out of the incubator and kept at room temperature until further use. Overnight cultures were started in 3 mL EZ-Rich medium containing 7.2% glucose and the appropriate antibiotics in snap cap tubes about 14 hours prior to the start of the fermentation. Isobutanol fermentations were then carried out in EZ-Rich defined medium containing 7.2% glucose and the appropriate antibiotics. Screw cap flasks with 20 mL EZ-Rich medium containing 7.2% glucose and the appropriate antibiotics were inoculated with 1% of the grown overnight culture. The cells were incubated at 37° C./250 rpm until they were grown to an OD₆₀₀ of 0.6-0.8 and induced with Isopropyl β-D-1-thiogalactopyranoside (IPTG, 1 mM).

[0535] After induction the cells were incubated at 30° C./250 rpm. Samples were taken from the medium before induction, and 24 and 48 hours after inoculation, spun down at 22,000×g for 1 min to separate the cell pellet from the supernatant and stored frozen at −20° C. until analysis.

[0536] The ADH2 gene product is expected to be functionally expressed from pSA55 and required for isobutanol production. Thus, no isobutanol should be produced with the plasmid combination lacking ADH2 as adhE is deleted in JCL260. However, isobutanol production for the system lacking ADH2 was higher than for the system with ADH2 expression. Table 18 shows the results for the isobutanol fermentation comparing the pathway including Adh2 expression with the exact same system excluding Adh2 expression. Both systems feature Bs_AlsS1, Ec_IlvC and Ec_ilvD expressed from the same medium copy plasmid and LI_Kivd1 expressed from a high copy plasmid. Volumetric productivity and titer showed 42% increase, specific productivity 18% and yield 12% increase. This suggests strongly that a native E. coli dehydrogenase is responsible for the conversion of isobutyraldehyde to isobutanol. and that Adh2 is not expressed and not necessary for isobutanol production in E. coli.

TABLE 18
Isobutanol fermentation with and without Adh2 expression

| | Volumetric | | Specific | | | | | |
|---|---|---|---|---|---|---|---|---|
| | Productivity | | Productivity | | Titer | | Yield | |
| samples | [g/L/h] | ± | [g/L/h/OD] | ± | [g/L] | ± | [g/g] | ± |
| without Adh2 | 0.175 | 0.006 | 0.039 | 0.003 | 8.40 | 0.26 | 0.207 | 0.009 |
| with Adh2 | 0.123 | 0.004 | 0.033 | 0.001 | 5.88 | 0.17 | 0.185 | 0.004 |

### Example 11

### Identification of Native ADH

[0537] This example illustrates that the native E. coli alcohol dehydrogenase is encoded by the Ec_yqhD gene (SEQ ID NO: 68).

[0538] Several E. coli genes predicted or known to code for alcohol dehydrogenases were knocked out of strain JCL260 to determine whether any of them are involved in isobutyraldehyde reduction. Fermentations were carried out with GEVO1608 and with JCL260, each transformed with plasmids pGV1609 (SEQ ID NO: 108) and pGV1631 by electroporation. Single colonies were grown and two colonies from each strain were started in a 3 mL overnight culture, with appropriate antibiotics. Each 250 mL fermentation flask was filled with 20 mL of EZ-Rich medium (Neidhardt, F. C., P. L. Bloch, and D. F. Smith. 1974. Culture medium for enterobacteria. J. Bacteriol. 119:736-47) supplemented with 5% glucose, Ampicillin (100 mg/mL), and Chloramphenical (100 mg/mL).

[0539] The cell densities of the overnight cultures were normalized and 2% inoculum was added to each fermentation flask and incubated at 270 rpm/37° C. The cultures were induced with 20 μL 0.1 M IPTG after they reached an OD₆₀₀ of 0.6-0.8 at which time the temperature was lowered to 30° C. Samples were taken from the medium before induction, and 24 hours after inoculation, spun down at 22,000×g for 1 min to separate the cell pellet from the supernatant and stored frozen at −20° C. until analysis. A second fermentation was performed in the same way with the best candidate, GEVO1608 containing the yqhD deletion, and samples were taken at 24 and 48 hours.

[0540] While both GEVO1608 and JCL260 grew to similar cell densities, GEVO1608 produced ˜80% less isobutanol than the control strain (Table 19), indicating that the Ec_yqhD gene product is primarily responsible for isobutyraldehyde reduction.

TABLE 19
Specific Productivity and Titer of Fermentation

| Strain | Plasmids | Time | Titer (g/L) |
|---|---|---|---|
| GEVO1608 | pGV1609, pGV1631 | 24 h | 0.33 |
| JCL260 | pGV1609, pGV1631 | 24 h | 2.45 |
| GEVO1608 | pGV1609, pGV1631 | 48 h | 0.83 |
| JCL260 | pGV1609, pGV1631 | 48 h | 4.00 |

### Example 12

### Overexpression of NADH-Dependent Alcohol Dehydrogenase and Propanediol Dehydrogenases

[0541] This example demonstrates that overexpression of an NADH-dependent alcohol dehydrogenase or propanediol dehydrogenases increases isobutanol production.

[0542] Relevant E. coli strains were transformed with the appropriate plasmids (Table 20).

TABLE 20
Plasmid and strain combinations used in isobutanol fermentations

| # | Plasmid 1 | Plasmid 2 | Strain | Comments |
|---|---|---|---|---|
| 1 | pGV1655 | pGV1698 | GEVO1745 | No ADH on plasmid |
| 2 | pGV1655 | pGV1698 | JCL260 | GEVO1780 |
| 3 | pGV1655 | pGV1748 | GEVO1745 | Ec_fucO |
| 4 | pGV1655 | pGV1749 | GEVO1745 | Dm_ADH |
| 5 | pGV1655 | pGV1778 | GEVO1745 | Kp_dhaT |

[0543] Following transformation, the strains were plated on LB-plates containing the appropriate antibiotics and incubated overnight at 37° C. Overnight cultures were started in 3 mL EZ-Rich medium (Neidhardt, F. C., P. L. Bloch, and D. F. Smith. 1974. Culture medium for Enterobacteria. J. Bacteriol. 119:736-47) containing 8% glucose and the appropriate antibiotics in snap cap tubes about 14 h prior to the start of the fermentation. Isobutanol fermentations were then carried out in EZ-Rich Medium containing 8% glucose and the appropriate antibiotics. Screw cap flasks with 25 mL EZ-Rich medium containing 8% glucose and the appropriate antibiotics were inoculated with a sufficient volume of the grown overnight culture to obtain a starting OD₆₀₀ of 0.1. The cells were incubated at 37° C./250 rpm until they reached an OD₆₀₀ of 0.6-0.8 followed by induction with Isopropyl β-D-1-thiogalactopyranoside (IPTG, 1 mM). After induction, cultures were capped, sealed and placed in 30° C. shaker, 225 rpm to start fermentation. Samples (2 mL) were taken 24 h and 48 h post induction, centrifuged at 22,000×g for 1 min and the supernatant stored at 4° C. until analyzed. Prior to analysis, the supernatants were filtered and then analyzed via Gas Chromatography and High Performance Liquid Chromatography. All experiments were carried out in triplicate.

[0544] Results are presented in Table 21, below. Expression of either 1,2-propanediol dehydrogenase Ec_fucO or 1,3-propanediol dehydrogenase Kp_dhaT significantly and reproducibly increases titer in the ΔyqhD background of strain GEVO1745. Expression of Dm_ADH enhances titer and yield of the fermentations in the ΔyqhD background of strain GEVO1745.

TABLE 21
Summary of isobutanol titer, and yield data from fermentations after 48
hours

| # | Comments | titer [g/L] | ± | Yield [% theor.] | ± |
|---|---|---|---|---|---|
| 1 | no ADH | 1.91 | 0.50 | 38.5 | 10.30 |
| 2 | GEVO1780 | 3.39 | 0.15 | 65.0 | 2.83 |
| 3 | Ec_FucO | 6.30 | 0.10 | 79.9 | 1.79 |
| 4 | Dm_Adh | 4.86 | 0.29 | 67.0 | 4.54 |
| 5 | Kp_DhaT | 6.22 | 0.16 | 75.3 | 2.04 |

### Example 13

### Characterization of Alcohol Dehydrogenases

[0545] This example demonstrates that the alcohol dehydrogenases Ec_FucO (SEQ ID NO: 65), Kp_DhaT (SEQ ID NO: 63), and Dm_Adh (SEQ ID NO: 61) catalyze the NADH-dependent reduction of isobutyraldehyde.

[0546] E. coli strain GEVO1745 was transformed by electroporation with one of plasmids pGV1705-A, pGV1748-A, pGV1749-A, or pGV1778-A. 50 mL of TB medium (23.1 g/L KH2PO4, 125.4 g/L K2HPO4, 12 g/L Bacto-tryptone, 24 g/L yeast extract, 4 ml/L glycerol) were inoculated to an initial OD₆₀₀ of 0.2 using a 3 mL overnight LB culture of a single colony. The 50 mL culture was allowed to grow for 3-4 hrs at 250 rpm and 37° C. Protein expression was induced at an OD₆₀₀ of 2-2.5 by the addition of IPTG to a final concentration of 1 mM. After the addition of IPTG, protein expression was allowed to continue for 20-24 hours at 225 rpm and 25° C.

[0547] Alcohol dehydrogenase (ADH) activity was assayed kinetically by monitoring the decrease in NAD(P)H concentration by measuring the absorbance at 340 nm. A reaction buffer was prepared containing 0.1 M potassium phosphate, 0.4 mM NAD(P)H, 10 mM isobutyraldehyde, 1 mM DTT, and 1 mM PMSF. Cell pellets were resuspended in 0.1 M potassium phosphate buffer containing 1 mM DTT and 1 mM PMSF at one fifth of the culture volume, i.e. 10 mL resuspension buffer for cell pellet from a 50 mL culture. The resuspended cells were lysed by sonication for 1 min with a 50% duty cycle. The reaction was initiated by the addition of 0.5 mL of the reaction buffer to 0.5 mL of clarified lysate in a cuvette. Dilution of the clarified lysate was necessary for ADHs that were highly active. A substrate free control was conducted using reaction buffer without the addition of aldehyde.

[0548] Kinetic parameters were determined for Ec_YqhD, Ec_FucO, Dm_Adh, and Kp_DhaT (Table 22).

TABLE 22
Kinetic parameters for the conversion of isobutyraldehyde to
isobutanol by Ec_YqhD, Ec_FucO, Dm_Adh, and Kp_DhaT

| | | NADH | | NADPH | |
|---|---|---|---|---|---|
| | | | Activity | | Activity |
| | | | (U/min⁻¹ | | (U/min⁻¹ |
| | | K_{M} | mg⁻¹ crude | K_{M} | mg⁻¹ crude |
| Plasmid | ADH | (mM) | lysate) | (mM) | lysate) |
| pGV1705-A | Ec_YqhD | n.d. | n.d. | 0.25 | 0.09 |
| pGV1748-A | Ec_FucO | 0.8 | 0.23 | 0.2 | 0.04 |
| pGV1749-A | Dm_Adh | 0.9 | 6.60 | 2.7 | 1.70 |
| pGV1778-A | Kp_DhaT | 1.3 | 0.56 | 0.6 | 0.08 |

[0549] The kinetic properties of the LI_AdhA enzyme were described by Atsumi et al. (Atsumi et al., Appl. Microbiol. Biotechnol., 2009, DOI 10.1007/s00253-009-2085-6), and are shown in Table 23.

TABLE 23
Kinetic parameters for Ll_AdhA (Atsumi et al., Appl. Microbiol. Biotechnol.,
2009, DOI 10.1007/s00253-009-2085-6)

| | | NADH | | | NADPH | | |
|---|---|---|---|---|---|---|---|
| | | K_{M} | | | K_{M} | | |
| ADH | Substrate | (mM) | k_{cat} (s⁻¹) | Kcat/K_{M} | (mM) | k_{cat} (s⁻¹) | Kcat/K_{M} |

| | | | | | |
|---|---|---|---|---|---|
| Ll_AdhA | Acetaldehyde | 0.5 | 10 | 20.9 | n.d.^{a} |
| Ll_AdhA | isobutyraldehyde | 9.1 | 6.6 | 0.8 | |

^{a}did not show any detectably activity when tested with NADPH as a cofactor

### Example 14

### KARI Engineering by Saturation Mutagenesis

[0550] Construction of KARI-containing plasmids: Standard molecular biology procedures (Sambrook and Russell, Molecular Cloning, A Laboratory Manual, 3^{rd} Edition, Vol. 3, 2001) were utilized to make plasmid pGV1711 (SEQ ID NO: 113) (pLIacO1::(no ORF) bla, ColE1 ORI). Plasmid pGV1711 is a high-copy, AmpR vector that serves as an “empty vector” control, i.e. it contains no open reading frames under the control of the PLIac promoter. The E. coli KARI gene Ec_ilvC (SEQ ID NO: 10) was codon optimized for E. coli resulting in gene Ec_ilvC_coEc (SEQ ID NO: 11)

[0551] The codon optimized gene Ec_ilvC_coEc was cloned into pET22b(+) using primers KARIpETfor and KARIpETrev introducing a 5′ NdeI and a 3′ XhoI restriction site and a C-terminal his₆-tag, resulting in plasmid pET22b[ilvCco] carrying Ec_ilvC_coEc^{his6}(SEQ ID NO: 14).

[0552] DNA constructs were analyzed by restriction digests, and also by DNA sequencing to confirm integrity and correct construction. Primers pETup and KARIpETrev were used as primers in standard DNA sequencing reactions to sequence pET22b(+) derivatives.

[0553] Construction of NNK libraries: NNK libraries were constructed using site directed mutagenesis overlap extension (SOE) PCR. First, the fragments containing the mutations were created allowing for at least 15 by of overlap using KARIpET_for and KARIpET_rev and the respective NNK primers listed in Table 6 (SEQ ID NO 285 through SEQ ID NO 298). After digesting traces of template DNA with DpnI, the fragments were separated on a 1% TAE agarose gel, extracted, and the PCR products were precipitated using pellet paint (Novagen). The clean products were used as templates in a subsequent assembly PCR. The PCR product was cleaned up (Zymo Research, Orange, Calif.), restriction digested with NdeI and XhoI for 1.5 h at 37° C., cleaned on a 1% agarose gel, and ligated into pET22b(+).

[0554] Site directed mutagenesis mutants were generated as described above. The successful mutagenesis was confirmed by DNA sequencing.

[0555] Cell growth and protein expression in shake flasks: Flasks containing 25 mL of Luria-Bertani (LB) medium (10 g tryptone, 10 g NaCl, 5 g yeast extract) with ampicillin (final concentration 0.1 mg/mL) were inoculated to an initial OD₆₀₀ of 0.1 using 0.25 mL overnight LB culture of a single colony. The 25 mL LB expression culture was allowed to grow for 3-4 h at 250 rpm and 37° C. Protein expression was induced at OD₆₀₀ of 1 by the addition of IPTG to a final concentration of 0.5 mM. Protein expression was allowed to continue for 20-24 h at 225 rpm and 25° C. Cells were harvested at 5300×g and 4° C. for 10 min and the cell pellets were frozen at −20° C. until further use.

[0556] Cell growth and protein expression in microplates: In order to grow and express KARI variants in deep well plates, sterile toothpicks were used to pick single colonies into shallow 96 well plates filled with 300 μl LBₐₘₚ. 75 μl of these overnight cultures were used to inoculate deep well plates filled with 600 μl of LBₐₘₚ per well. The plates were grown at 37° C. and 210 rpm for 4 h. One hour before induction with IPTG (final concentration 0.5 mM), the temperature of the incubator was reduced to 25° C. After induction, growth and expression continued for 20 h at 25° C. and 210 rpm. Cells were harvested at 5300×g and 4° C. and stored at −20° C.

[0557] KARI cuvette assay: KARI activity was assayed kinetically by monitoring the decrease in NAD(P)H concentration by measuring the absorbance at 340 nm. A reaction buffer was prepared containing 250 mM potassium phosphate pH 7, 1 mM DTT and 10 mM MgCl₂. Cell pellets were resuspended (0.25 g wet weight/mL buffer) in 250 mM potassium phosphate (KPi) buffer containing 1 mM DTT and 10 mM MgCl₂. The resuspended cells were lysed by sonication for 1 min with a 50% duty cycle and pelleted at 11000×g and 4° C. for 15 min. A reaction mixture consisting of 910 μl reaction buffer, 50 μl acetolactate, and 20 μl lysate was prepared in a cuvette. The reaction was initiated by addition of 20 μL of 10 mM NAD(P)H. A substrate free control was conducted using reaction buffer without the addition of acetolactate.

[0558] KARI high-throughput assay: Frozen cell pellets were thawed at room temperature for 20 min and then 100 μL of lysis buffer (250 mM Kpi, 750 mg/L lysozyme, 10 mg/L DNaseI, pH 7) were added. Plates were vortexed to resuspend the cell pellets. After a 30 min incubation at 37° C., plates were centrifuged at 5300×g and 4° C. for 10 min. 20 μL of the resulting crude extract were transferred into assay plates (flat bottom, Rainin) using a liquid handling robot. 10 mL assay buffer per plate were prepared (250 mM Kpi, pH 7, 500 μL acetolactate, 1 mM DTT, 10 mM NAD(P)H, and 10 mM MgCl₂) and 90 μL thereof were added to each well to start the reaction. The depletion of NAD(P)H was monitored at 340 nm in a plate reader (TECAN) over 1.5 min.

[0559] Purification of KARI: Cell pellets used for purification were resuspended in purification buffer A (20 mM Tris, 20 mM imidazol, 100 mM NaCl, 10 mM MgCl₂, pH 7.4). KARI was purified by IMAC (Immobilized metal affinity chromatography) over a 1 ml Histrap High Performance (histrap HP) column pre-charged with Nickel (GE Healthcare) using an Akta FPLC system (GE Healthcare). The column was equilibrated with four column volumes (cv) of buffer A. After injecting the crude extract, the column was washed with buffer A for 2 cv, followed by a wash step with a mixture of 10% elution buffer B (20 mM Tris, 300 mM imidazol, 100 mM NaCl, 10 mM MgCl₂, pH 7.4) for 5 cv. KARI variants were eluted at 40% buffer B and stored at 4° C.

[0560] Homology modeling was performed with pymol and x-ray structures of E. coli KARI (PDB ID: 1YRL) and spinach KARI (PDB ID: 1YVE), the latter containing NADPH co-crystallized.

[0561] A KARI expression construct (pGV1777 (SEQ ID NO: 118)) (pLIacO1::Ec_ilvC_coEc::bla, ColE1 ORI) was tested in E. coli strain GEVO1777 and yielded KARI activity in lysates. On this plasmid, the ilvC gene was not his-tagged and therefore no purification was attempted. In order to obtain higher expression levels for a high-throughput screen (HTS) in 96-well plate format, ilvC_co was sub-cloned into pET22b(+). This plasmid also ads a his-tag to the C-terminus of the protein to facilitate purification. E. coli BL21 (DE3) (Lucigen, Middleton, Wis.) cells were transformed with pET22[ilvCco] and protein expression was performed in LB medium with ampicillin at 25° C. SDS PAGE analysis (FIG. 15) shows a comparison of crude extracts of BL21 (DE3) and GEVO1777 expressing KARI.

[0562] Table 24 shows the specific activities in U/mg of KARI in lysates of GEVO1777 and BL21(DE3) being 15-fold higher in BL21 crude extract, mirroring the results shown in the SDS PAGE.

TABLE 24
Specific Activities of KARI in U/mg Expressed in GEVO1777 and
BL21 (DE) measured with NADPH

| Strain/Construct | U/mg Crude Extract |
|---|---|
| pGV1777 in GEVO1777 | 0.03 |
| pET22b[ilvCco] in BL21 (DE3) | 0.45 |

[0563] Purification of his-tagged KARI expressed from pET22[ilvCco] in BL21(DE3) cells was first performed over a linear gradient to determine the proper amount of imidazol to elute KARI. Then, a step gradient was implemented and the protein was eluted at 40% elution buffer B (140 mM imidazol). A SDS PAGE documented the purity of the enriched protein (FIG. 16).

[0564] A quadruplet E. coli IlvC mutant (R68D:K69L:K75V:R76D), which was described previously by Rane and coworkers (Rane et al., 1997, Arch Biochem Biophys 338: 83-89) was constructed using the respective primers listed in Table 6 (SEQ ID NO: 281 through SEQ ID NO 284) and cloned into pET22b(+) as described, but did not yield the cofactor switch that was described in the paper, although the ratio NADH/NADPH was 2.5 (wild-type 0.08). In fact, the specific activity of the quadruplet mutant on NADH was even worse than wild-type (Table 25), suggesting this mutant enzyme is not suited for the aforementioned aims.

TABLE 25
Comparison of specific activities from purified Ec_IlvC^{his6} and
purified IlvC^{quadruplet-his6} quadruplet in U/mg measured on NAD(P)H

| | U/mg with | U/mg with | NADH/ |
|---|---|---|---|
| Variant | NADH | NADPH | NADPH |
| Ec_IlvC^{his6} | 0.03 | 1 | 0.08 |
| IlvC^{quadruplet-his6} | 0.45 | 0.02 | 2.5 |

[0565] Since the quadruplet KARI mutant did not yield the promised activity, the Ec_ilvC_coEc^{his6} gene (SEQ ID NO: 14) was used as starting point for engineering a cofactor switch. A structure alignment of E. coli KARI with spinach KARI was generated (FIG. 17) because spinach KARI was co-crystallized with NADPH. The position of the cofactor in the spinach KARI structure was in good agreement with the NADPH phosphate group in the E. coli KARI structure. Based on this, amino acid residues R68, A71, R76, S78, and Q110 seemed likely to be interacting with NADPH and therefore were chosen as targets in a site saturation mutagenesis experiment. Only residues R68 and R76 were found in the aforementioned quadruplet mutant. Residues K69 and K75 seemed less likely to be involved in cofactor binding.

[0566] Five individual site saturation libraries were generated and electro-competent E. coli BL21(DE3) cells were transformed with the desalted ligation mixtures. 88 clones of each library were screened for NAD(P)H depletion at 340 nm in microplates. Clones with an improved NADH/NADPH consumption ratio while maintaining or increasing their NADH activity were chosen for a rescreen. Variants that passed the rescreen were sequenced, expressed in shake flasks, purified, and characterized.

[0567] The first screening round resulted in several improved variants in terms of their specific activity on NADH (and NADPH for most of them) (Table 26). The first variant to favor NADH over NADPH was Ec_IlvC^{S78D-his6} which showed a specific activity for NADH that equals the specific activity of Ec_IlvC^{his6} for NAPDH (1 U/mg). Table 26 shows the variants resulting from the first round of site saturation mutagenesis compared to the parent Ec_IlvC^{his6}. All proteins were purified over a histrap column.

TABLE 26
Specific Activities for NADH and NADPH in U/mg

| | U/mg | U/mg | NADH/ |
|---|---|---|---|
| Variant | NADH | NADPH | NADPH |
| No mutation | 0.08 | 1 | 0.08 |
| (Ec_IlvC^{his6}) | | | |
| Ec_IlvC^{R68L-his6} | 0.27 | 1.15 | 0.23 |
| Ec_IlvC^{A71T-his6} | 0.48 | 1.81 | 0.27 |
| Ec_IlvC^{A71S-his6} | 0.57 | 2.65 | 0.22 |
| Ec_IlvC^{R76G-his6} | 0.64 | 2.73 | 0.23 |
| Ec_IlvC^{R76S-his6} | 0.59 | 1.51 | 0.39 |
| Ec_IlvC^{R76T-his6} | 0.25 | 1 | 0.25 |
| Ec_IlvC^{R76D-his6} | 0.26 | 0.69 | 0.38 |
| Ec_IlvC^{S78D-his6} | 1 | 0.61 | 1.64 |
| Ec_IlvC^{Q110A-his6} | 0.85 | 2 | 0.43 |
| Ec_IlvC^{Q110V-his6} | 0.93 | 2 | 0.47 |

[0568] The three best variants Ec_IlvC^{S78D-his6}, Ec_IlvC^{Q110A-his6}, and Ec_IlvC^{Q110V-his6} were characterized according to their specific activities [U/mg], k_{cat} values [s⁻¹], catalytic efficiencies [M⁻¹*s⁻¹] (FIG. 18), and K_{M} values (Table 27).

TABLE 27
K_{M} values of Ec_IlvC^{his6} compared to three variants resulting
from the site saturation library

| | K_{M} [mM] | K_{M} [mM] |
|---|---|---|
| Variant | NADPH | NADH |
| Ec_IlvC^{his6} | 41 | 1075 |
| Ec_IlvC^{S78D-his6} | 658 | 130 |
| Ec_IlvC^{Q110V-his6} | 13 | 135 |
| Ec_IlvC^{Q110A-his6} | 24 | 277 |

[0569] All three variants were improved compared to the parent Ec_IlvC^{his6}. Ec_IlvC^{S78D-his6} was the first variant to show an actual preference of NADH over NADPH, while variants Ec_IlvC^{Q110A-his6} and Ec_IlvC^{Q110V-his6} showed drastic improvements in their overall catalytic efficiencies (FIG. 18). Table 28 contains a comparison of the K_{M} values of Ec_IlvC^{his6} with the three best variants resulting from the site saturation mutagenesis library on both cofactors. All variants showed improved K_{M} values on NADH. While Ec_IlvC^{Q110V-his6} and Ec_IlvC^{Q110A-his6} had improved K_{M} values on NADPH compared to wild-type, the K_{M} value of variant Ec_IlvC^{S78D-his6} on NADPH was decreased 16-fold from 1075 μM to 130 μM. The catalytic efficiencies on NADH were greatly improved as well. Ec_IlvC^{his6} showed 1,000 M⁻¹*^{s-1}, while Ec_IlvC^{S78D-his6} yielded 27,600 M⁻¹*^{s-1}.

TABLE 28
Catalytic efficiencies [M⁻¹*s⁻¹] for Ec_IlvC^{his6} and variants
Ec_IlvC^{Q110V-his6}, Ec_IlvC^{Q110A-his6}, and Ec_IlvC^{S78D-his6} on
NADPH

| | | | (k_{cat}/K_{M} with |
|---|---|---|---|
| | | | NADH)/(k_{cat}/K_{M} of |
| | k_{cat}/K_{M} | k_{cat}/K_{M} | Ec_IlvC^{his6} with |
| | with NADH | with NADH | NADPH) |
| Variant | [M⁻¹ * s⁻¹] | [M⁻¹ * s⁻¹] | [%] |
| Ec_IlvC^{his6} | 1000 | 87300 | 1% |
| Ec_IlvC^{Q110V-his6} | 24800 | 569000 | 28% |
| Ec_IlvC^{Q110A-his6} | 11063 | 301800 | 13% |
| Ec_IlvC^{S78D-his6} | 27600 | 3770 | 32% |

[0570] As a next step, the gene encoding variant Ec_IlvC^{Q110V-his6} (SEQ ID NO: 23) was used as template to generate individual combinations of the mutation Q110V with other mutations: R68L, A71T, A71S, R76G, R76S, R76T, S78D, and R76D. After screening the variants as described above, the most promising ones were expressed, purified, and characterized. Table 29 lists the K_{M} values in μM on NADPH and NADH for Ec_IlvC^{his6}, Ec_IlvC^{Q110V-his6}, and variants of Ec_IlvC^{Q110V-his6}. Variant Ec_IlvC^{B8-his6} containing amino acid mutations Q110V and S78D, showed the same K_{M} value for NADH and for NADPH with 65 μM. The A71S mutation was introduced into Ec_IlvC^{B8-his6} resulting in a variant Ec_IlvC^{B8A71S-his6}, which yielded 44% catalytic efficiency on NADH compared to the catalytic efficiency of wild-type KARI on NADPH (FIG. 19 and Table 30).

TABLE 29
K_{M} values for Ec_IlvC^{his6}, Ec_IlvC^{Q110V-his6}, and variants of
Ec_IlvC^{Q110V-his6} on NADPH and on NADH

| | K_{M} for NADPH | K_{M} for NADH |
|---|---|---|
| Variant | [mM] | [mM] |
| Ec_IlvC^{his6} | 41 | 1075 |
| Ec_IlvC^{Q110V-his6} | 13 | 135 |
| Ec_IlvC^{Q110VA71T-his6} | 37 | 80 |
| Ec_IlvC^{Q110VA71S-his6} | 30 | 70 |
| Ec_IlvC^{Q110VR76G-his6} | 47 | 87 |
| Ec_IlvC^{Q110VR76S-his6} | n.d. | 223 |
| Ec_IlvC^{B8-his6} | 65 | 65 |

TABLE 30
Catalytic efficiencies [M⁻¹ * s⁻¹] for wild-type Ec_IlvC^{his6} and
variants Ec_IlvC^{Q110V-his6}, Ec_IlvC^{Q110A-his6}, and Ec_IlvC^{S78D-his6} on
NAD(P)H compared to Ec_IlvC^{B8-his6} and Ec_IlvC^{B8A71S-his6}

| | | | (k_{cat}/K_{M} with |
|---|---|---|---|
| | | | NADH)/(k_{cat}/ |
| | k_{cat}/K_{M} with | k_{cat}/K_{M} with | K_{M} of Ec_IlvC^{his6} |
| | NADH | NADH | with NADPH) |
| Variant | [M⁻¹ * s⁻¹] | [M⁻¹ * s⁻¹] | [%] |
| Ec_IlvC^{his6} | 1000 | 87300 | 1% |
| Ec_IlvC^{Q110V-his6} | 24800 | 569000 | 28% |
| Ec_IlvC^{Q110A-his6} | 11063 | 301800 | 13% |
| Ec_IlvC^{S78D-his6} | 27600 | 3770 | 32% |
| Ec_IlvC^{B8-his6} | 31775 | 34188 | 36% |
| Ec_IlvC^{B8A71S-his6} | 38330 | 37459 | 44% |

### Example 15

### KARI Engineering by Recombination

[0571] The codon optimized gene Ec_ilvC_coEc^{his6} (SEQ ID NO: 14) and libraries thereof were cloned into pET22b(+) using primers KARIpETfor and KARIpETrev (Table 6). DNA constructs were analyzed by restriction digests, and also by DNA sequencing to confirm integrity and correct construction. Primers pETup and KARIpETrev (Table 6) were used as primers in standard DNA sequencing reactions to sequence pET22b(+) derivatives.

[0572] The recombination library was constructed using SOE PCR introducing mutations found at the five targeted sites while allowing for wild-type sequence as well. The first fragments were generated using degenerate primers R68A71 recombfor and R68A71 recombrev which covered the gene sequence coding for the region at amino acid positions 68/71 (Table 6). After assembling the long and the short fragment, the assembly product was DpnI digested for 1 h, separated on an agarose gel, freeze'n'squeeze (BioRad, Hercules, Calif.) treated, and finally pellet painted (Novagen, Gibbstown, N.J.). The clean assembly product served as template for the second round of SOE PCR introducing mutations at amino acid positions 76/78 using the following primers: R68A71recombfor, R68A71recombrev, R76S78recombfor, R76S78recombrev, G76S78recombfor, G76S78recombrev, S76S78recombfor, S76S78recombrev, T76S78recombfor, T76S78recombrev, D76S78recombfor, D76S78recombrev, R76D78recombfor, R76D78recombrev, G76D78recombfor, G76D78recombrev, S76D78recombfor, S76D78recombrev, T76D78recombfor, T76D78recombrev, D76D78recombfor, D76D78recombrev (Table 6). The mixture of primers was used, since degenerate codons would have expanded the library size immensely. Again, the assembly product served as template to complete the recombination library with amino acid position 110. The same procedure was applied as described for the first two rounds of SOE PCR. Primers used were again a mixture prepared out of equimolar concentrations of Q110Qfor, Q110Qrev, Q110Afor, Q110Arev, Q110Vfor, and Q110Vrev. After all sites were recombined, the insert was restriction digested with NdeI and XhoI, ligated into pET22b(+), and electro-competent BL21(D3) (Lucigen, Middleton, Wis.) were transformed. In order to oversample the library by approximately five-fold, one thousand clones were picked and cultured as described below. In order to check for possible biases (i.e. certain mutations occurring more frequently than others), 20 clones were randomly chosen for DNA sequence analysis.

[0573] As described in Example 14, the first screening round identified several individual point mutations within the KARI cofactor binding region that either improved NADH-dependent activity or were at least neutral (i.e. had neither a beneficial nor deleterious effect). These mutations, along with the wild-type amino acid residue are listed in Table 31.

TABLE 31
Amino Acid Mutations Included in the Recombinatorial Library

| | | | Total # |
|---|---|---|---|
| Amino Acid | | Neutral or beneficial | (including |
| Position | Wild-type | mutations identified | wild-type) |
| 68 | R | L | 2 |
| 71 | A | T, S | 3 |
| 76 | R | G, S, T, D | 5 |
| 78 | S | D | 2 |
| 110 | Q | A, V | 3 |

[0574] A complete recombination library was constructed allowing for all beneficial and some neutral mutations (and including the wild-type residues) at each of the five sites. The total number of unique combinations was 180.

[0575] Generating all mutations using a single primer would result in a large library of ˜4,000. Thus, the present inventors built the library stepwise in three SOE reactions using primers mixed in equimolar amounts for each of three SOE reactions:
[0576] SOE 1: R68/A71, R68/T71, R68/S71, L68/A71, L68/T71, L68/S71
[0577] SOE 2: A76/S78, G76/S78, S76/S78, T76/S78, D76/S78, A76/D78, G76/D78, S76/D78, T76/D78, D76/D78,
[0578] SOE 3: Q110, A110, V110

[0579] First, mutations at amino acid sites 68 and 71 were introduced into the Ec_ilvC_coEc^{his6} gene, followed by mutations at site 76 and finally, by mutations at site 110. After the library had been generated, it was ligated into pET22b(+). The resulting plasmid library was used to transform E. coli BL21(DE3) electro-competent cells. Cells were grown in 96-well plates according to the protocol for cell growth and protein expression in microplates as described in Example 14. The KARI enzyme activity of each of 1,000 individual transformants was determined using the high-throughput assay as described in Example 14.

[0580] Only 20% of the enzymes of the recombination library were active on NADH. After screening 1,000 clones using the NADH depletion assay at 340 nm, 26 KARI variants were selected for a rescreen by the high-throughput assay described in Example 14 and eight thereof were expressed in 25 ml LBₐₘₚ medium in shake flasks according to the protocol for cell growth and protein expression in shake flasks as described in Example 14, purified according to the protocol for purification of KARI enzymes as described in Example 14, and NAD(P)H depletion at 340 nm was measured again. Two candidates Ec_IlvC^{2H10-his6} (containing the amino acid substitutions A71S, R76D, S78D, and Q110A) and Ec_IlvC^{6E6-his6} (containing the amino acid substitutions A71S, R76D, S78D, and Q110V) showed good specific activity on NADH and were only marginally active on NADPH. The other six variants showed lower specific activities on NADH (ranging from 0.44-0.55 U/mg) compared to the two favored variants Ec_IlvC^{2H10-his6} and Ec_IlvC^{6E6-his6} and higher specific activities on NADPH (0.72-2.62 U/mg). The K_{M} values of variants Ec_IlvC^{2H10-his6} and Ec_IlvC^{6E6-his6} were measured and the catalytic efficiencies were calculated.

[0581] The kinetic parameters of the recombination variants and previously described KARI mutants are shown in Table 32. Both variants found in the recombination library showed an almost complete switch in cofactor preference from NADPH to NADH. The K_{M} values of the mutants on NADH rival the K_{M} value of KARI Ec_IlvC^{his6} on NADPH (44.2 and 31.6 μM on NADH vs. 41 μM for Ec_IlvC^{his6} on NADPH). The catalytic efficiencies of Ec_IlvC^{2H10-his6} and Ec_IlvC^{6E6-his6} on NADH (60322 and 74045 M⁻¹*s⁻¹, respectively) came very close to the catalytic efficiency of Ec_IlvC^{his6} on NADPH (87300 M⁻¹*s⁻¹). The mutants described herein exhibit a complete reversal in cofactor specificity and the NADH-dependent activity approaches the NADPH-dependent activity of the wild-type enzyme. The best variant exhibited 85% activity (in terms of k_{cat}/K_{M}) on NADH compared to wild-type activity on NADPH.

TABLE 32
Kinetic parameters of Ec_IlvC^{his6}, two of the enzymes described previously
(Ec_IlvC^{B8-his6} and Ec_IlvC^{B8A71S-his6}), as well as the two mutants
Ec_IlvC^{2H10-his6} and Ec_IlvC^{6E6-his6}

| | U/mg | | K_{M} [μM] | | k_{cat} [^{s-1}] | | k_{cat}/K_{M} [M⁻¹ * s⁻¹] | |
|---|---|---|---|---|---|---|---|---|
| Variant | NADH | NADPH | NADH | NADPH | NADH | NADPH | NADH | NADPH |
| Ec_IlvC^{his6} | 0.08 | 1.00 | 1,075 | 41 | 1.0 | 3.6 | 1,000 | 87,300 |
| Ec_IlvC^{B8-his6} | 0.57 | 0.62 | 65 | 65 | 2.0 | 2.2 | 31,775 | 34,188 |
| Ec_IlvC^{B8A71S-his6} | 0.57 | 0.66 | 53.5 | 63.4 | 2.0 | 2.4 | 38,330 | 37,459 |
| Ec_IlvC^{2H10-his6} | 0.74 | 0.17 | 44.2 | 568 | 2.6 | 0.61 | 60,322 | 1,078 |
| Ec_IlvC^{6E6-his6} | 0.65 | 0.07 | 31.6 | 653 | 2.3 | 0.2 | 74,045 | 386 |

[0582] The above data demonstrates the effects brought on by the beneficial mutations at positions 71 and 110. Moreover, aspartic acids at positions 76 and 78 electrostatically repel the phosphate of NADPH. It is noted that the electrostatic attraction of arginine to the NADPH phosphate is lost when R76 is mutated to an aspartic acid residue.

### Example 16

### KARI Engineering by Random Mutagenesis in Yeast

[0583] The following example demonstrates increases in specific, NADH-dependent KARI activity.

[0584] Methods: Plasmid pGV2241 (SEQ ID NO: 124) carrying the Ec_ilvC_coSc^{6E6-his6} gene (SEQ ID NO: 33) served as template for generating the first error-prone PCR library using forward primer pGV1994ep_for and reverse primer pGV1994_rev. These primers are specific to the backbone pGV1102 (SEQ ID NO: 101) and bind 50 by upstream and downstream of the KARI insert to create an overlap for homologous recombination in yeast. Generally, three different MnCl₂ concentrations were tested (100, 200, and 300 μM MnCl₂) and the PCR compositions are summarized in Table 33.

TABLE 33
PCR set up for different concentrations of MnCl₂ that were tested. The
final volumes were 100 μL and amounts of ingredients are in μL

| | final MnCl₂ concentration [μM] | | | | |
|---|---|---|---|---|---|
| | 100 | 150 | 200 | 250 | 300 |
| Template | 1 | 1 | 1 | 1 | 1 |
| primer forward | 2 | 2 | 2 | 2 | 2 |
| primer reverse | 2 | 2 | 2 | 2 | 2 |
| dNTP's | 4 | 4 | 4 | 4 | 4 |
| Taq buffer | 10 | 10 | 10 | 10 | 10 |
| MgCl₂ | 28 | 28 | 28 | 28 | 28 |
| Taq polymerase | 1.6 | 1.6 | 1.6 | 1.6 | 1.6 |
| MnCl₂ (1 mM stock) | 10 | 15 | 20 | 25 | 30 |
| PCR grade water | 41.4 | 36.4 | 31.4 | 26.4 | 21.4 |

[0585] The temperature profile was the following: 95° C. 3 min initial denaturation, 95° C. 30 s denaturation, 55° C. 30 s annealing, 72° C. 2 min elongation, 25 cycles, 5 min final elongation at 72° C.

[0586] The PCR products were checked on a 1% analytical TAE agarose gel, DpnI digested for 1 h at 37° C. to remove traces of template DNA, and then cleaned up using a 1% preparative TAE agarose gel. The agarose pieces containing the PCR products were put into Freeze ‘n’ Squeeze tubes (BIORAD, catalog #732-6166) and frozen for 10 min at −20° C. Then, they were spun down at room temperature and 10,000 rpm to “squeeze” the buffer with the soluble DNA out of the agarose mesh. The volume of the eluted DNA/buffer mixture was estimated and then subjected to the pellet paint procedure (Novagen, catalog #69049-3), which was performed according to the manufacturer's manual. The dried pink DNA pellets were resuspended in 50 μL PCR grade water. In the meantime, the restriction digest of the backbone pGV1102 (SEQ ID NO: 101) was performed as follows: 10 μL of DNA, 32 μL PCR grade water, 5 μL NEB buffer 3 (10×), 2 μL NotI, and 1 μL SalI. After an incubation time of 3 h at 37° C., the digest was run out on an agarose gel and then pellet painted as described above. After determining the DNA concentration of cut vector and insert, 500 ng of each were mixed together, precipitated with pellet paint, and resuspended in 6 μL of PCR grade water. This mixture can be prepared a day before the transformation.

[0587] In the evening before the planned transformation, YPD medium (10 g/L yeast extract, 20 g/L peptone, 20 g/L glucose) was inoculated with a single colony of GEVO1186 and incubated at 30° C. and 250 rpm over night. The next morning, a 20 mL YPD culture was started in a 250 ml Erlenmeyer flask without baffles with the overnight culture at an OD₆₀₀ of 0.1. This culture was incubated at 30° C. and 250 rpm until it reached an OD₆₀₀ of 1.3-1.5. When the culture had reached the desired OD₆₀₀, 200 μL of freshly prepared sterile-filtered Tris-DTT (0.39 g 1,4-dithiothreitol per 1 mL of 1 M Tris, pH 8.0) were added and the culture was allowed to incubate at 30° C. and 250 rpm for another 15 min. The cells were then pelleted at 4° C. and 2,500×g for 3 min. After removing the supernatant, the pellet was resuspended in 10 mL of ice-cold buffer E and spun down again as described above. Then, the cell pellet was resuspended in 1 mL of sterile-filtered ice-cold buffer E (1.2 g Tris base, 92.4 g glucose, and 0.2 g MgCl₂ per 1 L deionized water, adjusted to pH 7.5) and spun down one more time as before. After removal of the supernatant with a pipette, 200 μL of ice-cold buffer E (1.2 g/L Tris, 92.4 g/L glucose, and 0.2 g/L MgCl₂, pH 7.5) were added and the pellet was gently resuspended. The 6 μL of insert/backbone mixture were split in half and added to 50 μL of electrocompetent GEVO1186 cells. The DNA/cell mixtures were transferred into 0.2 cm electroporation cuvettes (BioRad) and electroporated without a pulse controller at 0.54 kV and 25 μF. 1 mL of pre-warmed YPD medium was added immediately and the transformed cells were allowed to regenerate at 30° C. and 250 rpm in 15 mL round bottom culture tubes (Falcon). After 1 hour, the cells were spun down at 4° C. and 2,500×g for 3 min, and the pellets were resuspended in 1 mL pre-warmed SD-URA medium (1.7 g/L yeast nitrogen base, 5 g/L ammonium sulfate, 20 g/L glucose, with casamino acids but without uracil (CSM-URA). Different amounts of transformed cells were plated on SD-URA agar plats plates and incubated at 30° C. for 1.5 days or until the colonies were large enough to be picked with sterile toothpicks.

[0588] Single yeast colonies were picked with sterile toothpicks into shallow 96-well plates containing 300 μL of SC-URA medium (6.7 g/L Difco™ Yeast Nitrogen Base, 14 g/L Sigma™ Synthetic propout Media supplement (includes amino acids and nutrients excluding histidine, tryptophan, uracil, and leucine), 10 g/L casamino acids, 20 g/L glucose, 0.018 g/L adenine hemisulfate, and 0.076 g/L tryptophan) per well. Each plate encompassed 88 wells with variants, four wells with parent, three wells with GEVO1886 carrying pGV1102 as background control, and one well with medium only, which served as a sterility control. The plates were incubated at 250 rpm and 30° C. in a humidified plate shaker (Kuhner) over night. On the next morning, 50 μL of the overnight culture were transferred into 600 μL SC-URA medium in 96 well deep well plates (2 mL capacity per well). The cultures were allowed to grow for another 8 h at the same conditions, before they were spun down at 4° C. and 5000 rpm for 5 min. The supernatants were removed and the pellets were frozen at −20° C. until they were screened for activity as described in Example 14 above.

[0589] Improved variants were expressed and purified from GEVO1186. 20 mL SC-URA medium overnight cultures were grown at 30° C. and 250 rpm in 250 mL flasks and were then used to inoculate 96 well deep well plates on the next morning. 50 μL of the overnight cultures were transferred into 600 μL SC-URA medium per well. The plates were then grown at 30° C. and 250 rpm in a humidified plate shaker for 8 h. In order to the harvest, the cultures were transferred into 50 mL Falcon tubes and then spun down at 4° C. and 5,000 rpm for 10 min. The pellets were frozen until they were processed and purified as described in Example 14 above.

[0590] Results: Two rounds of error-prone PCR and screening were carried out. The libraries (˜2400 clones per library) were screened using the KARI high-throughput assay. KARI variants that exhibited an improved activity compared to their parent (total of 88 variants) were picked and rescreened in triplicate and five clones were selected for sequencing and purification. In the first round variant Ec_IlvC^{P2D1-his6} (SEQ ID NO: 38), encoded by Ec_ilvC_coSc^{P2D1-his6} (SEQ ID NO: 37) was identified carrying the following mutations: D146G and G185R. This variant served as parent for the second round of error-prone PCR and screening which yielded variant Ec_IlvC^{P2D1-A1-his6} (SEQ ID NO: 42), encoded by Ec_ilvC_coSc^{P2D1-A1-his6} (SEQ ID NO: 41) with one additional mutation (K433E). The biochemical properties were determined and are summarized in Table 34. A two-fold improvement of the specific activity in lysate and in the purified enzyme was observed after two rounds of error-prone PCR.

TABLE 34
Comparison of the biochemical properties of the parent Ec_IlvC^{6E6-his-6} with
the variants found in round 1 (Ec_IlvC^{P2D1-his6}) and 2 (Ec_IlvC^{P2D1-A1-his6}).
The variants were purified before characterization

| | U/mg | | K_{M} [μM] | | k_{cat} [^{s-1}] | | k_{cat}/K_{M} [M⁻¹ * s⁻¹] | |
|---|---|---|---|---|---|---|---|---|
| Variant | NADH | NADPH | NADH | NADPH | NADH | NADPH | NADH | NADPH |
| Ec_IlvC^{6E6-his6} | 0.69 | | 39 | | 2.4 | | 63,000 | |
| Ec_IlvC^{P2D1-his6} | 0.92 | 0.15 | 40 | 1432 | 3.3 | 0.54 | 82,650 | 377 |
| Ec_IlvC^{P2D1-A1-his6} | 1.2 | 0.15 | 26 | >1432 | 4.3 | 0.54 | 167,687 | <377 |

### Example 17

### NADH-Dependent Anaerobic Isobutanol Production

[0591] This example illustrates that an isobutanol producing microorganism which is engineered to carry NADH-dependent KARI and ADH enzymes produces isobutanol at higher yield compared to strains engineered to carry NADPH-dependent KARI and ADH enzymes. These strains also acquire the ability to produce isobutanol anaerobically.

[0592] A first set of anaerobic fermentations with isobutanol producing strains according to Table 35 were performed. Strain GEVO1993 is an E. coli strain in which the native ilvC gene was deleted and the other three steps of the isobutanol pathway (Bs_alsS1, Ec_ilvD_coEc and LI_kivd1) were integrated into the chromosome.

TABLE 35
Strain/Plasmid combinations described herein.

| | | | | Cofactor |
|---|---|---|---|---|
| | | | | usage of the |
| | | | | isobutanol |
| Plasmid | Strain | KARI gene | ADH gene | pathway |
| pGV1777 | GEVO1993 | Ec_ilvC_coEc | Ec_yqhD | NADPH/ |
| | | | (native) | NADPH |
| pGV1925 | GEVO1993 | Ec_ilvC_coEc | Ec_fucO | NADPH/ |
| | | | | NADH |
| pGV1938 | GEVO1993 | Ec_ilvC_coEc^{S78D} | Ec_yqhD | NADH/ |
| | | | (native) | NADPH |
| pGV1927 | GEVO1993 | Ec_ilvC_coEc^{S78D} | Ec_fucO | NADH/ |
| | | | | NADH |

[0593] Overnight cultures of the GEVO1993 transformed with pGV1777 (SEQ ID NO: 118), pGV1925, pGV1938, or pGV1927 were started from individual colonies of previously transformed strains. These cultures were started in 3 mL M9 minimal medium (Miller, J.H. A Short Course in Bacterial Genetics: A laboratory manual and handbook for Escherichia coli and related bacteria. 1992. Cold Spring Harbor Laboratory Press, Cold Spring Harbor, N.Y.), supplemented with 10 g/L yeast extract, 10 μM ferric citrate and trace metals, containing 8.5% glucose and the appropriate antibiotics in snap cap tubes about 14 h prior to the start of the fermentation. Isobutanol fermentations were then carried out in screw cap flasks containing 20 mL of the same medium that was inoculated with 0.2 mL of the overnight culture. The cells were incubated at 37° C./250 rpm until the strains had grown to an OD₆₀₀ of 0.6-0.8 and were then induced with Isopropyl β-D-1-thiogalactopyranoside at 1 mM final concentration.

[0594] Three hours after induction the cultures were shifted to anaerobic fermentation conditions by loosening the cap of the flasks and placing the flasks into to a Coy Laboratory Products Type B Vinyl anaerobic chamber (Coy Laboratory Products, Grass Lakes, Mich.) through an airlock in which the flasks were cycled three times with nitrogen and vacuum, and then filled with the a hydrogen gas mix (95% Nitrogen, 5% Hydrogen). Once the flasks were inside the anaerobic chamber, the flasks were closed again and incubated without shaking at 30° C. Inside the chamber, an anaerobic atmosphere (<5 ppm oxygen) was maintained through the hydrogen gas mix (95% Nitrogen, 5% Hydrogen) reacting with a palladium catalyst to remove oxygen. The flasks in the anaerobic chamber were swirled twice a day. Samples (2 mL) were taken at the time of the shift and at 21 h and 45 h after shifting to anaerobic conditions, spun down at 22,000 g for 1 min to separate the cell pellet from the supernatant and stored frozen at −20° C. until analysis. The samples were analyzed using High performance liquid chromatography (HPLC) and gas chromatography GC. All experiments were performed in triplicate.

[0595] The OD₆₀₀ values of the cultures were similar amongst the three replicates. Notably, after 45 h, GEVO1993+pGV1927 (i.e. expressing NADH-dependent KARI and ADH) produced isobutanol at approximately twice the volumetric productivity, specific productivity, and titer. Surprisingly the theoretical yield increased from about 70% of theoretical to 96% of theoretical. Expressing only one NADH-dependent enzyme with the other enzyme being NADPH-dependent did not have an effect (Table 36).

TABLE 36
45 h performance parameters

| | | Vol. | | Spec. | | Anaerobic | | | |
|---|---|---|---|---|---|---|---|---|---|
| | | Productivity | | Productivity | | Yield^{a} | | Titer | |
| Sample | KARI/ADH | [g/L/h] | ± | [g/L/h/OD] | ± | % theor. | ± | [g/L] | ± |
| GEVO1993 + | Ec_IlvC/ | 0.044 | 0.019 | 0.018 | 0.003 | 72 | 3 | 2.4 | 1.0 |
| pGV1777 | Ec_YqhD | | | | | | | | |
| GEVO1993 + | Ec_IlvC/ | 0.031 | 0.002 | 0.017 | 0.003 | 55 | 4 | 1.9 | 0.1 |
| pGV1925 | Ec_FucO | | | | | | | | |
| GEVO1993 + | Ec_IlvC^{S78D}/ | 0.040 | 0.015 | 0.021 | 0.002 | 78 | 10 | 2.1 | 0.9 |
| pGV1938 | Ec_YqhD | | | | | | | | |
| GEVO1993 + | Ec_IlvC^{S78D}/ | 0.078 | 0.006 | 0.030 | 0.003 | 96 | 5 | 3.8 | 0.2 |
| pGV1927 | Ec_FucO | | | | | | | | |

^{a}The anaerobic yield is calculated by dividing the isobutanol produced from time of anaerobic shift until 45 hours after the shift by the amount of glucose consumed during this time period

[0596] A second set of anaerobic fermentations with isobutanol producing strains according to Table 37 were performed to demonstrate that the of improved KARI variants correlates with an improvement of isobutanol production under anaerobic conditions.

TABLE 37
Strain/Plasmid combinations used for the second set of anaerobic fermentations.

| | | | | | | KARI |
|---|---|---|---|---|---|---|
| | | | | ADH | KARI | (k_{cat}/K_{M,NADH})/ |
| # | Plasmid | Strain | KARI gene | gene | k_{cat}/K_{M,NADH} | (k_{cat}/K_{M,NADPH}) |
| 1 | pGV1927 | GEVO1993 | Ec_ilvC_coEc^{S78D} | Ec_fucO | 27,600 | 7 |
| 2 | pGV1976 | GEVO1993 | Ec_ilvC_coEc^{2H10} | Ec_fucO | 60,300 | 56 |
| 3 | pGV1975 | GEVO1993 | Ec_ilvC_coEc^{6E6} | Ec_fucO | 74,000 | 192 |

[0597] The experiment was carried out as described above except that the cell cultures were induced at an OD₆₀₀ of 0.8-1.0 instead of 0.6-0.8 and shifted to anaerobic conditions at and OD OD₆₀₀ of 4.0-6.0 instead of 3 hours after induction. In addition, samples were taken at the time of the anaerobic shift and 24 h and 48 h after induction (i.e. 20 h and 44 h after the anaerobic shift, respectively).

[0598] 44 hours after shift to anaerobic fermentation conditions, the trend for volumetric and specific productivity is the same as observed 20 hours after shift to anaerobic conditions: strains carrying improved KARI variants Ec_IlvC^{2H10} and Ec_IlvC^{6E6} produced isobutanol at higher volumetric and specific productivity as well as yield compared to strains carrying KARI variant Ec_IlvC^{S78D} (Table 38).

TABLE 38
44 h performance parameters

| | | Vol. | | Spec. | | anaerobic | | | |
|---|---|---|---|---|---|---|---|---|---|
| | | Productivity | | Productivity | | Yield^{a} | | Titer | |
| Sample | KARI/ADH | [g/L/h] | ± | [g/L/h/OD] | ± | % theor. | ± | [g/L] | ± |
| GEVO1993 + | Ec_IlvC^{S78D}/ | 0.215 | 0.005 | 0.037 | 0.002 | 79 | 12 | 10.9 | 0.3 |
| pGV1927 | Ec_FucO | | | | | | | | |
| GEVO1993 + | Ec_IlvC^{2H10}/ | 0.274 | 0.008 | 0.047 | 0.002 | 107 | 15 | 13.0 | 0.6 |
| pGV1976 | Ec_FucO | | | | | | | | |
| GEVO1993 + | Ec_IlvC^{6E6}/ | 0.270 | 0.032 | 0.047 | 0.005 | 97 | 2 | 12.5 | 1.5 |
| pGV1975 | Ec_FucO | | | | | | | | |

^{a}The anaerobic yield is calculated by dividing the isobutanol produced from time of anaerobic shift until 44 hours after the shift by the amount of glucose consumed during this time period

### Example 18

### NADH-Dependent Anaerobic Isobutanol Production in Yeast

[0599] This example illustrates that isobutanol producing yeast microorganisms engineered to carry NADH-dependent KARI and ADH enzymes produce isobutanol at higher yields compared to isobutanol producing yeast microorganisms engineered to carry NADPH-dependent KARI and/or ADH enzymes. These strains also produce isobutanol anaerobically.

[0600] Cultures of GEVO2710, GEVO2711 and GEVO2799 transformed with pGV2227 (SEQ ID NO: 123) or pGV2242 (SEQ ID NO: 125) and cultures of GEVO2710, and GEVO2799 transformed with pGV2020 (SEQ ID NO: 121) or pGV2082 (SEQ ID NO: 122) were started from individual colonies of previously transformed and purified strains. These cultures were started in 14 ml round-bottom snap-cap test tubes containing 3 ml of YPD medium supplemented with 0.2 g/L G418 antibiotic, and1% (v/v) of a stock solution containing 3 g/L ergosterol and 66 g/L Tween 80 dissolved in ethanol. The snap-cap test tubes were not closed completely so that air would vent in/out of the tubes. After growth for about 10 hours at 30° C. shaking at 250 rpm, these cultures were added to 47 ml of the same medium in 250 ml non-baffled flasks with sleeve closures and incubated for about 14 hours at 30° C. shaking at 250 rpm. Isobutanol fermentations were then carried out after harvesting the cells from the 50 ml cultures by centrifugation, and resuspending the cell pellets in f 50 ml of the same medium in 250 ml non-baffled flasks to an initial optical density (OD₆₀₀) of 3-6.

[0601] Anaerobic fermentations were carried out by inoculating flasks with screw-cap closures as above and placing the flasks with loose caps into to a Coy Laboratory Products Type B Vinyl anaerobic chamber (Coy Laboratory Products, Grass Lakes, Mich.) through an airlock in which the flasks were cycled three times with nitrogen and vacuum, and then filled with a hydrogen gas mix (95% Nitrogen, 5% Hydrogen). The flasks were moved inside the anaerobic chamber from the airlock and the screw-caps on the flasks were closed inside the anaerobic chamber. Inside the chamber, an anaerobic atmosphere (<5 ppm oxygen) was maintained through the hydrogen gas mix (95% Nitrogen, 5% Hydrogen) reacting with a palladium catalyst to remove oxygen. The flasks were then removed from the anaerobic chamber and incubated outside the anaerobic chamber at 30° C. shaking at 75 rpm. Samples (2 ml) were taken at the beginning of the incubation of the anaerobic fermentations and after 24 hours, 48 hours and 72 hours of incubation. The samples taken at the beginning of the incubation were taken before moving the flasks into the anaerobic chamber. The 24 hour and 48 hour samples were taken by moving the flasks into the anaerobic chamber through the airlock as above, opening the flasks in the anaerobic chamber to remove the samples, re-closing the flasks in the anaerobic chamber and removing the flasks from the anaerobic chamber for continued incubation. The 72 hour samples were taken outside of the anaerobic chamber because these were the final samples from the flasks.

[0602] Samples from fermentations were centrifuged for 10 minutes at 18,000 g to separate the cells from the supernatant. The supernatant was removed and stored under refrigeration until analyzed by gas chromatography and high performance liquid chromatography as described above. All experiments were performed in triplicate.

[0603] In the anaerobic fermentations the OD₆₀₀ values of the cultures were similar amongst the three replicates. Notably, after 72 hours in anaerobic fermentations, GEVO2710+pGV2242, GEVO2711+pGV2242 and GEVO2799+pGV2242 (i.e. strains expressing an NADH-dependent KARI) produced isobutanol at an approximately 1.25- to 2-fold higher volumetric productivity, specific productivity, and titer than the same strains containing pGV2227 (i.e. strains expressing an NADPH-dependent KARI). The anaerobic yield increased from about 16-25% of theoretical to 22-35% of theoretical (Table 39).

TABLE 39
72 hour performance parameters from anaerobic fermentations

| | KARI/ADH | Vol. | | Spec. | | | | Specific | |
|---|---|---|---|---|---|---|---|---|---|
| | overexpressed | Productivity | | Productivity | | Yield | | Titer | |
| Sample | from plasmid | [g/L/h] | ± | [g/L/h/OD] | ± | % theor. | ± | [g/L/OD] | ± |
| GEVO2710 + | None/ | 0.000 | 0.000 | 0.0001 | 0.0000 | 1 | 0 | 0.01 | 0.00 |
| pGV2020 | None | | | | | | | | |
| GEVO2710 + | Ec_IlvC^{Q110V}/ | 0.006 | 0.001 | 0.0014 | 0.0001 | 21 | 2 | 0.10 | 0.01 |
| pGV2082 | Dm_Adh | | | | | | | | |
| GEVO2710 + | Ec_IlvC^{Q110V}/ | 0.006 | 0.001 | 0.0017 | 0.0003 | 17 | 9 | 0.12 | 0.02 |
| pGV2227 | Ll_AdhA | | | | | | | | |
| GEVO2710 + | Ec_IlvC^{P2D1}/ | 0.011 | 0.001 | 0.0029 | 0.0003 | 22 | 2 | 0.21 | 0.02 |
| pGV2242 | Ll_AdhA | | | | | | | | |
| GEVO2799 + | None/ | 0.001 | 0.000 | 0.0002 | 0.0000 | 6 | 1 | 0.01 | 0.00 |
| pGV2020 | None | | | | | | | | |
| GEVO2799 + | Ec_IlvC^{Q110V}/ | 0.010 | 0.000 | 0.0019 | 0.0003 | 38 | 2 | 0.14 | 0.02 |
| pGV2082 | Dm_Adh | | | | | | | | |
| GEVO2799 + | Ec_IlvC^{Q110V}/ | 0.009 | 0.001 | 0.0014 | 0.0002 | 20 | 2 | 0.10 | 0.01 |
| pGV2227 | Ll_AdhA | | | | | | | | |
| GEVO2799 + | Ec_IlvC^{P2D1}/ | 0.014 | 0.003 | 0.0026 | 0.0003 | 33 | 10 | 0.19 | 0.03 |
| pGV2242 | Ll_AdhA | | | | | | | | |
| GEVO2711 + | Ec_IlvC^{Q110V}/ | 0.008 | 0.000 | 0.0020 | 0.0000 | 24 | 2 | 0.14 | 0.00 |
| pGV2227 | Ll_AdhA | | | | | | | | |
| GEVO2711 + | Ec_IlvC^{P2D1}/ | 0.014 | 0.004 | 0.0025 | 0.0008 | 37 | 8 | 0.18 | 0.06 |
| pGV2242 | Ll_AdhA | | | | | | | | |

### Example 19

### Overexpression of an NADPH-Dependent GAPDH, GDP1

[0604] The purpose of this example is to describe how overexpression of an NADPH-dependent GAPDH can improve isobutanol production under anaerobic conditions.

[0605] GDP1 is expressed from plasmid pGV1573 (SEQ ID NO: 106) together with an isobutanol biosynthetic pathway expressed from pGV1485 (SEQ ID NO: 103) and pSA69. As a control the plasmid pGV1573 is replaced by the empty version of this plasmid pGV1572 (SEQ ID NO: 105). These plasmids are transformed into GEVO1859ΔgapA. Overnight cultures of Strain 1: GEVO1859 ΔgapA, pGV1573, pGV1485, pSA69 and Strain 2: GEVO1859ΔgapA, pGV1572, pGV1485, pSA69 are started from individual colonies of previously transformed strains. These cultures are started in 3 mL M9 minimal medium (Miller, J.H. A Short Course in Bacterial Genetics: A laboratory manual and handbook for Escherichia coli and related bacteria. 1992. Cold Spring Harbor Laboratory Press, Cold Spring Harbor, N.Y.), supplemented with 10 g/L yeast extract, 10 μM ferric citrate and trace metals, containing 8.5% glucose and the appropriate antibiotics in snap cap tubes about 14 h prior to the start of the fermentation. Isobutanol fermentations are then carried out in screw cap flasks containing 20 mL of the same medium that was inoculated with 0.2 mL of the overnight culture. The cells are incubated at 37° C./250 rpm until the strains had grown to an OD₆₀₀ of 0.6-0.8 and are then induced with Isopropyl β-D-1-thiogalactopyranoside at 1 mM final concentration.

[0606] Three hours after induction the cultures are shifted to anaerobic fermentation conditions by loosening the cap of the flasks and placing the flasks into to a Coy Laboratory Products Type B Vinyl anaerobic chamber (Coy Laboratory Products, Grass Lakes, Mich.) through an airlock in which the flasks are cycled three times with nitrogen and vacuum, and then filled with the a hydrogen gas mix (95% Nitrogen, 5% Hydrogen). Once the flasks are inside the anaerobic chamber, the flasks are closed again and incubated without shaking at 30° C. Inside the chamber, an anaerobic atmosphere (<5 ppm oxygen) was maintained through the hydrogen gas mix (95% Nitrogen, 5% Hydrogen) reacting with a palladium catalyst to remove oxygen. The flasks in the anaerobic chamber are swirled twice a day. Samples (2 mL) are taken at the time of the shift and at 24 h and 48 h after inoculation, spun down at 22,000 g for 1 min to separate the cell pellet from the supernatant and stored frozen at −20° C. until analysis. The samples are analyzed using High performance liquid chromatography (HPLC) and gas chromatography GC. All experiments are performed in duplicate.

### Example 20

### Overexpression of NADPH-Dependent GADPHs GDP1 and gapC

[0607] pGV1572 (SEQ ID NO: 105) (PLlacO, p15A, Cm^{R}) was constructed as an empty vector compatible with the plasmids pGV1698 (SEQ ID NO: 112) and pGV1655 (SEQ ID NO: 109) for the expression of the isobutanol pathway. The GAPDHs from Kluyveromyces lactis, and Clostridium acetobutylicum were cloned into pGV1572 to make pGV1573 (SEQ ID NO: 106) (PLlacO1::GDP1, p15A, Cm^{R}), and pGV1573 (SEQ ID NO: 107) (PLlacO1::GapC, p15A, Cm^{R}) respectively. K. lactis GAPDH was subcloned from pGV1323 (SEQ ID NO: 102), which contains the GDP1 gene cloned from genomic DNA of K. lactis. GapC (C. acetobutylicum) was cloned from genomic DNA using primers 1049 and 1050.

[0608] E. coli DH5αZ1 (Lutz, R. and Bujard, H, Nucleic Acids Research (1997) 25 1203-1210) was chosen as the host strain. This strain contains the Z1 integration which provides overexpression of lacI from a lacIq expression cassette. DH5aZ1 was transformed with pGV1572, pGV1573, and pGV1575. Transformants were used to inoculate 5 mL cultures, which were incubated at 37° C., 250 rpm overnight. 50 mL cultures were inoculated with 1 mL overnight culture and incubated at 37° C., 250 rpm. The cultures were induced with IPTG when OD₆₀₀ was approximately 0.6 and incubated at 30° C., 250 rpm for 2 hours. The cultures were centrifuged at 2700×g at 4° C. for 10 min and the pellets were frozen at −80° C.

[0609] Pellets were resuspended with lysis buffer to 40% (w/v). (lysis buffer was the same as the reaction buffer but without substrate and cofactors). Cells were lysed in a bead mill using 3 times 1 min intervals, placing them on ice for 2 min in between each run. The lysate was centrifuged at 25000×g at 4° C. for 10 min, the supernatant was kept on ice and it was used as whole cell lysate for the enzyme assays.

[0610] The total reaction volume was 100 μL consisting of 90 μL of Reaction Buffer: 50 mM glycine buffer pH 9.5, 5 mM EDTA, 40 mM triethanolamine, 3 mM beta-mercaptoethanol, 6 mM NAD+ or NADP+, and 10 pt lysate. 10 pt of lysate were pipette into a UV permeable 96 well plate. 90 pt of reaction buffer was added to the lysate and mixed well by pipetting up and down. The plate was read for 5 min at 340 nm. Results are shown in Table 40.

TABLE 40
Volumetric and specific activity of various GAPDH with NADP⁺

| | NADP⁺ | | | |
|---|---|---|---|---|
| | | Sp. Activity | | |
| | Volumetric | (nmol/min/ | | |
| | Activity | μg total | | |
| Lysate Name | (mU/ml) | cell protein) | pGV# | organism |
| gapC | 10.022 | 0.010 | 1575 | C. acetobutylicum |
| GDP1 | 26.849 | 0.031 | 1573 | K. lactis |
| Control | 3.819 | 0.005 | 1572 | |
| (DH5az1) | | | | |

[0611] DH5aZ1 was the host strain for all the plasmids and has its own indigenous GAPDH. The results show that the GAPDH enzymes are expressed and active in E. coli. The strain expressing GDP1 had more than 6 times higher in vitro GAPDH specific activity with the cofactor NADPH than the control strain not overexpressing GAPDH. The strain overexpressing gapC had twice the in vitro GAPDH specific activity with the cofactor NADPH than the control strain not overexpressing GAPDH.

### Example 21

### NADPH-Dependent GAPDH in Yeast

[0612] The purpose of this example is to describe how an isobutanol producing yeast which is engineered to express NADPH-dependent GAPDH and produce isobutanol anaerobically.

[0613] A yeast strain, GEVO5001, which expresses the isobutanol biosynthetic pathway and is deficient in pyruvate decarboxylase activity, is engineered to overproduce the K. lactis Gdp1. pGV6001 is a yeast integration plasmid carrying a hygromycin resistance marker and the GDP1 gene under the strong constitutive promoter from TDH3. This plasmid is linearized and transformed into GEVO5001 to generate GEVO5003. Expression of GDP1 is confirmed by qRT-PCR. Once confirmed, GEVO5003 and the parent strain GEVO5001 are used in fermentations for the production of isobutanol. Two fermentations are performed with the two strains. Fermentation 1 is an aerobic fermentation and Fermentation 2 is an anaerobic fermentation.

### Example 22

### pyk Bypass 1

[0614] This example illustrates that an isobutanol producing microorganism which is engineered to bypass the pyruvate kinase reaction shows increased productivity, titer and yield of isobutanol compared to the control strain without said engineering.

[0615] For the pyk bypass experiment, GEVO1385, GEVO1725 (triple deletion strain—tet repressor), and GEVO1751 were transformed with pGV1655 (SEQ ID NO: 109), pGV1698 (SEQ ID NO: 112), and pGV1490 (SEQ ID NO: 104) or pGV1661 (SEQ ID NO: 110). Strains GEVO1725 and GEVO1751 contain the deletions of pyruvate kinase and of the NADH dependent malic enzyme which are part of the pyruvate bypass engineering. All of these transformants were tested in isobutanol fermentations.

[0616] The aforementioned strains were grown overnight in two biological replicates for each strain in M9+A5 salts+FeCl3+10 g/L YE media and the appropriate antibiotics in 14 ml snap cap tubes and incubated at 37° C., 250 rpm. Screw cap flasks with 20 ml M9+A5 salts+FeCl3+10 g/L YE media and the appropriate antibiotics were inoculated with overnight culture to an OD₆₀₀ of 0.1. The cells were incubated at 37° C., 250 rpm until they were grown to an OD₆₀₀ of 0.6-0.8 and induced with IPTG [1 mM] and aTc [100 ng/ml]. Afterwards the cultures were incubated at 30° C., 250 rpm. Samples were taken of the medium, at 24 h and 48 h after inoculation. Samples were centrifuged at 15000 g for 1 min to separate the cell pellet from the supernatant and stored in −20° C. until sample submission. The samples were analyzed using High performance liquid chromatography (HPLC) and gas chromatography (GC).

[0617] The triple deletion strains GEVO1725 and GEVO1751 have a severe growth defect which is partially rescued by introduction of pGV1661.

[0618] The analysis of the fermentation data shows that the partial deletion strain, GEVO1750, with pGV1661 only has negative effects on isobutanol production (Tables 41, 42). However, at the 24 h time point the triple deletion strain with and without the tet repressor (GEVO1725 and GEVO1751 respectively) shows increased yield (Table 41). GEVO1725 shows a 20% increase in yield, with specific productivity similar to the control strain. GEVO1751 shows a 13% increase in yield and specific productivity.

TABLE 41
Analysis of the second pyk bypass fermentation from the 24 hour time point

| | Volumetric | | Specific | | | | | |
|---|---|---|---|---|---|---|---|---|
| | Productivity | | Productivity | | Titer | | Yield | |
| Samples 24 h | [g/L/h] | ± | [g/L/h/OD] | ± | [g/L] | ± | [g/g] | ± |
| GEVO1385 + pGV1655, | 0.205 | 0.008 | 0.031 | 0.001 | 4.93 | 0.18 | 0.277 | 0.002 |
| pGV1698, pGV1490 | | | | | | | | |
| (control) | | | | | | | | |
| GEVO1385 + pGV1655, | 0.197 | 0.003 | 0.028 | 0.002 | 4.65 | 0.01 | 0.285 | 0.035 |
| pGV1698, pGV1661 | | | | | | | | |
| (control) | | | | | | | | |
| GEVO1725 + pGV1655, | 0.125 | 0.009 | 0.034 | 0.005 | 2.83 | 0.19 | 0.331 | 0.029 |
| pGV1698, pGV1490 | | | | | | | | |
| GEVO1725 + pGV1655, | 0.184 | 0.002 | 0.031 | 0.001 | 4.16 | 0.04 | 0.333 | 0.004 |
| pGV1698, pGV1661 | | | | | | | | |
| GEVO1750 + pGV1655, | 0.144 | 0.004 | 0.022 | 0.001 | 3.30 | 0.14 | 0.267 | 0.001 |
| pGV1698, pGV1490 | | | | | | | | |
| GEVO1750 + pGV1655, | 0.080 | 0.005 | 0.013 | 0.001 | 1.84 | 0.09 | 0.305 | |
| pGV1698, pGV1661 | | | | | | | | |
| GEVO1751 + pGV1655, | 0.138 | 0.006 | 0.031 | 0.001 | 3.09 | 0.13 | 0.303 | 0.008 |
| pGV1698, pGV1490 | | | | | | | | |
| GEVO1751 + pGV1655, | 0.204 | 0.004 | 0.035 | 0.001 | 4.55 | 0.08 | 0.318 | 0.006 |
| pGV1698, pGV1661 | | | | | | | | |

TABLE 42
Analysis of the second pyk bypass fermentation from the 48 hour time point

| | Volumetric | | Specific | | | | | |
|---|---|---|---|---|---|---|---|---|
| | Productivity | | Productivity | | Titer | | Yield | |
| samples 48 h | [g/L/h] | ± | [g/L/h/OD] | ± | [g/L] | ± | [g/g] | ± |
| GEVO1385 + pGV1655, | 0.128 | 0.011 | 0.023 | 0.002 | 6.14 | 0.53 | 0.271 | 0.004 |
| pGV1698, pGV1490 | | | | | | | | |
| (control) | | | | | | | | |
| GEVO1385 + pGV1655, | 0.141 | 0.029 | 0.023 | 0.005 | 6.75 | 1.41 | 0.263 | 0.002 |
| pGV1698, pGV1661 | | | | | | | | |
| (control) | | | | | | | | |
| GEVO1725 + pGV1655, | 0.070 | 0.002 | 0.024 | 0.002 | 3.25 | 0.10 | 0.299 | 0.009 |
| pGV1698, pGV1490 | | | | | | | | |
| GEVO1725 + pGV1655, | 0.101 | 0.006 | 0.024 | 0.002 | 4.72 | 0.28 | 0.309 | 0.005 |
| pGV1698, pGV1661 | | | | | | | | |
| GEVO1750 + pGV1655, | 0.102 | 0.013 | 0.018 | 0.002 | 4.77 | 0.54 | 0.277 | 0.013 |
| pGV1698, pGV1490 | | | | | | | | |
| GEVO1750 + pGV1655, | 0.085 | 0.003 | 0.015 | 0.001 | 4.02 | 0.13 | 0.261 | 0.018 |
| pGV1698, pGV1661 | | | | | | | | |
| GEVO1751 + pGV1655, | 0.093 | 0.004 | 0.029 | 0.001 | 4.29 | 0.16 | 0.267 | 0.006 |
| pGV1698, pGV1490 | | | | | | | | |
| GEVO1751 + pGV1655, | 0.123 | 0.002 | 0.041 | 0.001 | 5.68 | 0.06 | 0.302 | 0.009 |
| pGV1698, pGV1661 | | | | | | | | |

[0619] To verify that maeB, ppc, and mdh were expressed, cell lysates were made from GEVO1780 transformed with the above plasmids and run on a protein gel (FIG. 20).

[0620] The gel shows that all pathway enzymes are expressed in GEVO1780 with pGV1490 (Ec_IlvD=65.5 kD, LI_Kivd1/Bs_AlsS1=60.9 kD, Ec_IlvC=54.1 kD). The gel also shows that all pathway enzymes and Ppc (99 kD), MaeB (82 kD), and Mdh (32 kD) are expressed in GEVO1780 with pGV1661.

### Example 23

### pyk Bypass 2

[0621] This example illustrates that an isobutanol producing microorganism which is engineered to bypass the pyruvate kinase reaction shows increased productivity, titer and yield of isobutanol compared to the control strain without overexpression of ppc or pck.

[0622] Both plasmid constructs (pGV1661 (SEQ ID NO: 110) and pGV1772) were sequence verified. GEVO1725, and GEVO1751 were transformed with isobutanol pathway plasmids pGV1655 (SEQ ID NO: 109) and pGV1698 (SEQ ID NO: 112), and pyk bypass plasmids pGV1661 (ppc) or pGV1772 (pck). The controls were the same strains and pathway plasmids, but with the empty vector, pGV1490 (SEQ ID NO: 104), in place of pGV1661 or pGV1772. Strains GEVO1725 and GEVO1751 have deletions of pyruvate kinase (pykAF) and of the NADH dependent malic enzyme, maeA, which are part of the pyruvate kinase bypass engineering. The difference between GEVO1725 and GEVO1751 is that GEVO1725 does not have the tet repressor, and therefore, pGV1490, pGV1661, and pGV1772 are constitutively expressed in this strain.

[0623] All of these transformants were tested in isobutanol fermentations.

[0624] Overnight cultures were started in duplicate for each transformation in 3 mL M9+A5 salts+FeCl₃+10 g/L YE media and the appropriate antibiotics in 14 mL snap cap tubes and incubated at 37° C., 250 rpm. Screw cap flasks with 20 mL M9+A5 salts+FeCl₃+10 g/L YE media and the appropriate antibiotics were inoculated to a starting OD₆₀₀ of 0.1 with overnight culture. The cells were incubated at 37° C., 250 rpm until they reached an OD₆₀₀ of 0.6-0.8 and were then induced with IPTG [1 mM] and aTc [1 ng/mL]. After induction, the cultures were switched to incubation at 30° C., 250 rpm. Samples were taken of the cultures at 24 and 48 hours after inoculation and OD₆₀₀ and pH were measured. Samples were centrifuged at 22,000×g for 5 min and the supernatant was collected and stored at −20° C. until sample submission. After 48 hour samples were taken, the remainder of the culture was transferred to a 50 ml tube, centrifuged at 4000×g, for 10 min at 4° C. The supernatant was removed, and the cell pellet was stored at −80° C. The samples were analyzed using High performance liquid chromatography (HPLC) and gas chromatography (GC).

[0625] The deletion strains with pck (pGV1772) had greater specific productivities than the strains with ppc (pGV1661). When ppc is used in the pyk bypass system in GEVO1725 and GEVO1751, the specific productivity of these strains increased by 3% in GEVO1751 and by 13% in GEVO1725 compared to GEVO1385 with the empty vector. When pck is used instead of ppc, the specific productivity increased by 43% in GEVO1725 and by 50% in GEVO1751. Both of the deletion strains show improved volumetric and specific productivity, titer, and yield when pGV1661 and pGV1772 are expressed compared to the empty vector (Table 43).

TABLE 43
Isobutanol production at 24 hours for pyk bypass system with ppc or pck

| | Volumetric | | Specific | | | | | |
|---|---|---|---|---|---|---|---|---|
| | Productivity | | Productivity | | Titer | | Yield | |
| samples 24 h | [g/L/h] | ± | [g/L/h/OD] | ± | [g/L] | ± | [g/g] | ± |
| GEVO1725 empty | 0.126 | 0.001 | 0.033 | 0.001 | 3.03 | 0.03 | 0.224 | 0.005 |
| vector | | | | | | | | |
| GEVO1725 pGV1661 | 0.266 | 0.003 | 0.045 | 0.001 | 6.38 | 0.07 | 0.304 | 0.022 |
| GEVO1725 pGV1772 | 0.311 | 0.021 | 0.057 | 0.003 | 7.46 | 0.49 | 0.306 | 0.006 |
| GEVO1751 empty | 0.159 | 0.005 | 0.033 | 0.001 | 3.83 | 0.1 | 0.218 | 0.002 |
| vector | | | | | | | | |
| GEVO1751 pGV1661 | 0.262 | 0.054 | 0.041 | 0.005 | 6.29 | 1.29 | 0.236 | 0.035 |
| GEVO1751 pGV1772 | 0.309 | 0.049 | 0.06 | 0.002 | 7.41 | 1.18 | 0.292 | 0.005 |

### Example 24

### NADH Kinase and NADP+ Phosphatase in Yeast

[0626] The purpose of this example is to describe how an isobutanol producing yeast which is engineered to express NADPH biosynthesis enzymes to convert NADH into NADPH can produce isobutanol under anaerobic conditions.

[0627] A yeast strain GEVO5001 which expresses the isobutanol biosynthetic pathway and is deficient in pyruvate decarboxylase activity is engineered to express NADH kinase and NADP+ phosphatase. pGV6000, which is a yeast integration plasmid carrying an hygromycin resistance marker, NADH kinase and NADP+ phosphatase, is linearized by restriction digestion and transformed into GEVO5001. NADH kinase and NADP+ phosphatase are expressed using the strong constitutive promoters from TEF1 and TDH3, respectively. Clones in which the NADH kinase and NADP+ phosphatase are first identified by resistance to hygromycin. The clones are confirmed to be expressing NADH kinase and NADP+ phosphatase by qRT-PCR. The resulting strain, GEVO5002, along with the parent strain, GEVO5001, is used in fermentations for production of isobutanol.

### Example 25

### Metabolic Transhydrogenation in Yeast

[0628] This example describes an isobutanol producing yeast which is engineered to convert NADH into NADPH through the combination of two redox enzymes that are catalyzing a conversion that is part of the same pathway wherein one redox enzyme oxidizes NADH and the other redox enzyme reduces NADP+.

[0629] The yeast strain, GEVO5001, is a yeast strain that has been engineered to be deficient in pyruvate decarboxylase activity and also to express the isobutanol pathway. A pyruvate bypass is generated by overexpressing in this yeast the genes for (a) pyruvate carboxylase (PYC1 or PYC2), (b) malate dehydrogenase, MDH2, and (c) malic enzyme (maeB). These genes are cloned to generate the yeast integration plasmid, pGV6004. This plasmid carries the hygromycin resistance marker and expresses PYC1, MDH2 and maeB under the strong promoters from ADH1, TEF1 and TDH3, respectively. pGV6004 is linearized and transformed into GEVO5001 to generate GEVO5006. Over-expressions of PYC1, MDH2 and maeB are confirmed by qRT-PCR.

### Example 26

### Conservation of the Amino Acid Residue Corresponding to Serine 78 of the Wild-Type E. coli KARI

[0630] The following example illustrates how additional long-form ketol-acid reductoisomerases (KARIs) are identified.

[0631] Long-form ketol-acid reductoisomerases were identified through protein-protein BLAST (blastp) searches of publicly available databases of non-redundant protein sequences (nr database) using the amino acid sequence of E. coli IlvC (SEQ ID NO: 13) with the following search parameters: Expect threshold=10, word size=3, matrix=Blosum62, gap opening=11, gap extension=1.

[0632] All sequences of >415 amino acids in length, 347 in total, were selected and are listed in Table 44. The sequences were aligned using a profile alignment in AlignX, a component of Vector NTI Advance 10.3.1 which aligns all selected sequences against a reference sequence, in this case NP_{—}418222 (identical to E. coli IlvC, SEQ ID NO: 13). The term “profile alignment” describes the alignment of two alignments. The method is a simple extension of the profile method of Gribskov, et al. (Gribskov, M., McLachlan, A.D. and Eisenberg, D. (1987) Profile analysis: detection of distantly related proteins. PNAS USA 84, 4355-4358) for aligning a sequence with an alignment. The following parameters were used for the profile alignment: Gap penalty for helix core residue=4; gap penalty for strand core residue=4; gap penalty for structure termini=2; gap penalty for loop regions=1; number of residues inside helix to be treated as terminal=3; number of residues outside a helix to be treated as terminal=0; number of residues inside a strand to be treated as terminal=1; number of residues outside a strand to be treated as terminal=1.

[0633] The sequence alignment (FIG. 51) showed complete conservation amongst the long-form ketol-acid reductoisomerases at the amino acid position corresponding to the Serine 78 residue of SEQ ID NO: 13. The only exception is for sequence BAH82904 which has a conservative threonine substitution at this position. Strong conservation was also shown amongst the long-form ketol-acid reductoisomerases at the amino acid positions corresponding to the alanine 71, arginine 76, and glutamine 110 residues of SEQ ID NO: 13. Of the 347 long-form ketol-acid reductoisomerases identified, 326, 339, and 341 harbored alanine, arginine, and glutamine residues corresponding to the alanine 71, arginine 76, and glutamine 110 residues of SEQ ID NO: 13, respectively.

TABLE 44
KARI enzymes of >415 amino acid residues identified by blastp search
with the amino acid sequence of E. coli IlvC:

| GenBank | SEQ ID | | |
|---|---|---|---|
| Accession No. | NO: | Length | Description |
| ZP_08375997 | 331 | 563 | ketol-acid reductoisomerase (Acetohydroxy-acidisomeroreductase) |
| | | | (Alpha-keto-beta-hydroxylacil reductoisomerase) [Escherichia coli |
| | | | TA280]. |
| EGB08261 | 332 | 552 | hypothetical protein AURANDRAFT_53694 [Aureococcus |
| | | | anophagefferens]. |
| EGB85373 | 333 | 541 | ketol-acid reductoisomerase [Escherichia coli MS 117-3]. |
| YP_543282 | 334 | 541 | ketol-acid reductoisomerase [Escherichia coli UTI89]. |
| ZP_04006446 | 335 | 541 | Ketol-acid reductoisomerase [Escherichia coli 83972]. |
| ZP_07098963 | 336 | 541 | ketol-acid reductoisomerase [Escherichia coli MS 107-1]. |
| ZP_07137864 | 337 | 541 | ketol-acid reductoisomerase [Escherichia coli MS 115-1]. |
| ZP_07690695 | 338 | 541 | ketol-acid reductoisomerase [Escherichia coli MS 145-7]. |
| ZP_08350682 | 339 | 541 | ketol-acid reductoisomerase (Acetohydroxy-acidisomeroreductase) |
| | | | (Alpha-keto-beta-hydroxylacil reductoisomerase) [Escherichia coli |
| | | | M605]. |
| ZP_08395131 | 340 | 541 | ketol-acid reductoisomerase [Shigella sp. D9]. |
| ADA76149 | 341 | 536 | Ketol-acid reductoisomerase [Shigella flexneri 2002017]. |
| EGB30597 | 342 | 536 | ketol-acid reductoisomerase [Escherichia coli E1520]. |
| YP_691054 | 343 | 536 | ketol-acid reductoisomerase [Shigella flexneri 5 str. 8401]. |
| ZP_04873037 | 344 | 536 | ketol-acid reductoisomerase [Escherichia sp. 1_1_43]. |
| ZP_08356452 | 345 | 536 | ketol-acid reductoisomerase (Acetohydroxy-acidisomeroreductase) |
| | | | (Alpha-keto-beta-hydroxylacil reductoisomerase) [Escherichia coli |
| | | | M718]. |
| ZP_04630132 | 346 | 532 | Ketol-acid reductoisomerase [Yersinia bercovieri ATCC 43970]. |
| ZP_04642312 | 347 | 532 | Ketol-acid reductoisomerase [Yersinia mollaretii ATCC 43969]. |
| YP_002917111 | 348 | 531 | ketol-acid reductoisomerase [Klebsiella pneumoniae subsp. |
| | | | pneumoniae NTUH-K2044]. |
| YP_001443713 | 349 | 514 | ketol-acid reductoisomerase [Vibrio harveyi ATCC BAA-1116]. |
| ZP_02961747 | 350 | 505 | hypothetical protein PROSTU_03806 [Providencia stuartii ATCC |
| | | | 25827]. |
| ZP_04617113 | 351 | 505 | ketol-acid reductoisomerase [Yersinia ruckeri ATCC 29473]. |
| ZP_04923867 | 352 | 503 | ketol-acid reductoisomerase [Vibrio sp. Ex25]. |
| YP_004578893 | 353 | 500 | ketol-acid reductoisomerase [Lacinutrix sp. 5H-3-7-4]. |
| ZP_02161514 | 354 | 500 | ketol-acid reductoisomerase [Kordia algicida OT-1]. |
| ZP_02181891 | 355 | 500 | ketol-acid reductoisomerase [Flavobacteriales bacterium ALC-1]. |
| ZP_01060688 | 356 | 499 | ketol-acid reductoisomerase [Leeuwenhoekiella blandensis |
| | | | MED217]. |
| YP_004124638 | 357 | 498 | ketol-acid reductoisomerase [Candidatus Blochmannia vafer str. |
| | | | BVAF]. |
| ZP_01050446 | 358 | 498 | ketol-acid reductoisomerase [Dokdonia donghaensis MED134]. |
| ZP_01306608 | 359 | 496 | ketol-acid reductoisomerase [Bermanella marisrubri]. |
| ZP_06156533 | 360 | 495 | ketol-acid reductoisomerase [Photobacterium damselae subsp. |
| | | | damselae CIP 102761]. |
| ABD66583 | 361 | 494 | ketol-acid reductoisomerase [Vibrio cholerae]. |
| AEA77464 | 362 | 494 | Ketol-acid reductoisomerase [Vibrio cholerae LMA3984-4]. |
| EGF42466 | 363 | 494 | ketol-acid reductoisomerase [Vibrio parahaemolyticus 10329]. |
| EGR03889 | 364 | 494 | ketol-acid reductoisomerase [Vibrio cholerae HE39]. |
| EGR10479 | 365 | 494 | ketol-acid reductoisomerase [Vibrio cholerae HE48]. |
| EGU41134 | 366 | 494 | ketol-acid reductoisomerasee [Vibrio splendidus ATCC 33789]. |
| NP_229819 | 367 | 494 | ketol-acid reductoisomerase [Vibrio cholerae O1 biovar El Tor str. |
| | | | N16961]. |
| NP_760028 | 368 | 494 | ketol-acid reductoisomerase [Vibrio vulnificus CMCP6]. |
| NP_796414 | 369 | 494 | ketol-acid reductoisomerase [Vibrio parahaemolyticus RIMD |
| | | | 2210633]. |
| YP_002157314 | 370 | 494 | ketol-acid reductoisomerase [Vibrio fischeri MJ11]. |
| YP_002261639 | 371 | 494 | ketol-acid reductoisomerase [Aliivibrio salmonicida LFI1238]. |
| YP_002415754 | 372 | 494 | ketol-acid reductoisomerase [Vibrio splendidus LGP32]. |
| YP_002891495 | 373 | 494 | ketol-acid reductoisomerase [Tolumonas auensis DSM 9187]. |
| YP_003284611 | 374 | 494 | ketol-acid reductoisomerase [Vibrio sp. Ex25]. |
| YP_004436406 | 375 | 494 | ketol-acid reductoisomerase [Glaciecola sp. 4H-3-7 + YE-5]. |
| YP_004440448 | 376 | 494 | ketol-acid reductoisomerase [Treponema brennaborense DSM |
| | | | 12168]. |
| YP_004564924 | 377 | 494 | Ketol-acid reductoisomerase [Vibrio anguillarum 775]. |
| YP_004843660 | 378 | 494 | Ketol-acid reductoisomerase [Flavobacterium branchiophilum]. |
| YP_004873667 | 379 | 494 | ketol-acid reductoisomerase [Glaciecola nitratireducens FR1064]. |
| YP_128332 | 380 | 494 | ketol-acid reductoisomerase [Photobacterium profundum SS9]. |
| YP_205911 | 381 | 494 | ketol-acid reductoisomerase [Vibrio fischeri ES114]. |
| YP_663808 | 382 | 494 | ketol-acid reductoisomerase [Pseudoalteromonas atlantica T6c]. |
| ZP_00993208 | 383 | 494 | ketol-acid reductoisomerase [Vibrio splendidus 12B01]. |
| ZP_01067040 | 384 | 494 | ketol-acid reductoisomerase [Vibrio sp. MED222]. |
| ZP_01116327 | 385 | 494 | ketol-acid reductoisomerase [Reinekea blandensis MED297]. |
| ZP_01160403 | 386 | 494 | ketol-acid reductoisomerase [Photobacterium sp. SKA34]. |
| ZP_01223049 | 387 | 494 | ketol-acid reductoisomerase [Photobacterium profundum 3TCK]. |
| ZP_01237291 | 388 | 494 | ketol-acid reductoisomerase [Photobacterium angustum S14]. |
| ZP_01262768 | 389 | 494 | ketol-acid reductoisomerase [Vibrio alginolyticus 12G01]. |
| ZP_01816341 | 390 | 494 | ketol-acid reductoisomerase [Vibrionales bacterium SWAT-3]. |
| ZP_01870391 | 391 | 494 | ketol-acid reductoisomerase [Vibrio shilonii AK1]. |
| ZP_01951092 | 392 | 494 | ketol-acid reductoisomerase [Vibrio cholerae 1587]. |
| ZP_02196048 | 393 | 494 | ketol-acid reductoisomerase [Vibrio sp. AND4]. |
| ZP_04414286 | 394 | 494 | ketol-acid reductoisomerase [Vibrio cholerae bv. albensis VL426]. |
| ZP_05056766 | 395 | 494 | ketol-acid reductoisomerase, putative [Verrucomicrobiae bacterium |
| | | | DG1235]. |
| ZP_05120422 | 396 | 494 | ketol-acid reductoisomerase [Vibrio parahaemolyticus 16]. |
| ZP_05717058 | 397 | 494 | ketol-acid reductoisomerase [Vibrio mimicus VM573]. |
| ZP_05720722 | 398 | 494 | ketol-acid reductoisomerase [Vibrio mimicus VM603]. |
| ZP_05879603 | 399 | 494 | ketol-acid reductoisomerase [Vibrio furnissii CIP 102972]. |
| ZP_05883426 | 400 | 494 | ketol-acid reductoisomerase [Vibrio metschnikovii CIP 69.14]. |
| ZP_05883972 | 401 | 494 | ketol-acid reductoisomerase [Vibrio coralliilyticus ATCC BAA-450]. |
| ZP_05911056 | 402 | 494 | ketol-acid reductoisomerase [Vibrio parahaemolyticus AQ4037]. |
| ZP_05927497 | 403 | 494 | ketol-acid reductoisomerase [Vibrio sp. RC341]. |
| ZP_05942658 | 404 | 494 | ketol-acid reductoisomerase [Vibrio orientalis CIP 102891 = ATCC |
| | | | 33934]. |
| ZP_06040407 | 405 | 494 | ketol-acid reductoisomerase [Vibrio mimicus MB451]. |
| ZP_06051452 | 406 | 494 | ketol-acid reductoisomerase [Grimontia hollisae CIP 101886]. |
| ZP_06081449 | 407 | 494 | ketol-acid reductoisomerase [Vibrio sp. RC586]. |
| ZP_06173878 | 408 | 494 | ketol-acid reductoisomerase [Vibrio harveyi 1DA3]. |
| ZP_06943519 | 409 | 494 | ketol-acid reductoisomerase [Vibrio cholerae RC385]. |
| ZP_07743436 | 410 | 494 | ketol-acid reductoisomerase [Vibrio caribbenthicus ATCC BAA- |
| | | | 2122]. |
| ZP_08098316 | 411 | 494 | ketol-acid reductoisomerase [Vibrio brasiliensis LMG 20546]. |
| ZP_08104634 | 412 | 494 | ketol-acid reductoisomerase [Vibrio sinaloensis DSM 21326]. |
| ZP_08310897 | 413 | 494 | ketol-acid reductoisomerase [Photobacterium leiognathi subsp. |
| | | | mandapamensis svers.1.1.]. |
| ZP_08731305 | 414 | 494 | ketol-acid reductoisomerase [Vibrio nigripulchritudo ATCC 27043]. |
| ZP_08744172 | 415 | 494 | ketol-acid reductoisomerase [Vibrio ichthyoenteri ATCC 700023]. |
| ZP_08747945 | 416 | 494 | ketol-acid reductoisomerase [Vibrio scophthalmi LMG 19158]. |
| ZP_08908778 | 417 | 494 | ketol-acid reductoisomerase [Vibrio rotiferianus DAT722]. |
| EGT79222 | 418 | 493 | ketol-acid reductoisomerase [Haemophilus haemolyticus M19107]. |
| YP_001054540 | 419 | 493 | ketol-acid reductoisomerase [Actinobacillus pleuropneumoniae |
| | | | serovar 5b str. L20]. |
| YP_001092419 | 420 | 493 | ketol-acid reductoisomerase [Shewanella loihica PV-4]. |
| YP_001143912 | 421 | 493 | ketol-acid reductoisomerase [Aeromonas salmonicida subsp. |
| | | | salmonicida A449]. |
| YP_001343873 | 422 | 493 | ketol-acid reductoisomerase [Actinobacillus succinogenes 130Z]. |
| YP_001475898 | 423 | 493 | ketol-acid reductoisomerase [Shewanella sediminis HAW-EB3]. |
| YP_001500207 | 424 | 493 | ketol-acid reductoisomerase [Shewanella pealeana ATCC 700345]. |
| YP_001676144 | 425 | 493 | ketol-acid reductoisomerase [Shewanella halifaxensis HAW-EB4]. |
| YP_001758834 | 426 | 493 | ketol-acid reductoisomerase [Shewanella woodyi ATCC 51908]. |
| YP_001785151 | 427 | 493 | ketol-acid reductoisomerase [Haemophilus somnus 2336]. |
| YP_002309779 | 428 | 493 | ketol-acid reductoisomerase [Shewanella piezotolerans WP3]. |
| YP_002475862 | 429 | 493 | ketol-acid reductoisomerase [Haemophilus parasuis SH0165]. |
| YP_003093678 | 430 | 493 | ketol-acid reductoisomerase [Pedobacter heparinus DSM 2366]. |
| YP_003558619 | 431 | 493 | ketol-acid reductoisomerase [Shewanella violacea DSS12]. |
| YP_004274723 | 432 | 493 | ketol-acid reductoisomerase [Pedobacter saltans DSM 12145]. |
| YP_004317509 | 433 | 493 | ketol-acid reductoisomerase [Sphingobacterium sp. 21]. |
| YP_004394576 | 434 | 493 | ketol-acid reductoisomerase [Aeromonas veronii B565]. |
| YP_004822180 | 435 | 493 | ketol-acid reductoisomerase, NAD(P)-binding [Haemophilus |
| | | | parainfluenzae T3T1]. |
| YP_087237 | 436 | 493 | ketol-acid reductoisomerase [Mannheimia succiniciproducens |
| | | | MBEL55E]. |
| YP_271478 | 437 | 493 | ketol-acid reductoisomerase [Colwellia psychrerythraea 34H]. |
| YP_719876 | 438 | 493 | ketol-acid reductoisomerase [Haemophilus somnus 129PT]. |
| YP_749121 | 439 | 493 | ketol-acid reductoisomerase [Shewanella frigidimarina NCIMB 400]. |
| YP_854686 | 440 | 493 | ketol-acid reductoisomerase [Aeromonas hydrophila subsp. |
| | | | hydrophila ATCC 7966]. |
| YP_929154 | 441 | 493 | ketol-acid reductoisomerase [Shewanella amazonensis SB2B]. |
| YP_942294 | 442 | 493 | ketol-acid reductoisomerase [Psychromonas ingrahamii 37]. |
| ZP_00134485 | 443 | 493 | COG0059: Ketol-acid reductoisomerase [Actinobacillus |
| | | | pleuropneumoniae serovar 1 str. 4074]. |
| ZP_01224863 | 444 | 493 | ketol-acid reductoisomerase [gamma proteobacterium HTCC2207]. |
| ZP_01884737 | 445 | 493 | ketol-acid reductoisomerase [Pedobacter sp. BAL39]. |
| ZP_02155927 | 446 | 493 | ketol-acid reductoisomerase [Shewanella benthica KT99]. |
| ZP_02478674 | 447 | 493 | ketol-acid reductoisomerase [Haemophilus parasuis 29755]. |
| ZP_03967662 | 448 | 493 | ketol-acid reductoisomerase [Sphingobacterium spiritivorum ATCC |
| | | | 33300]. |
| ZP_04754564 | 449 | 493 | ketol-acid reductoisomerase [Actinobacillus minor NM305]. |
| ZP_04979281 | 450 | 493 | ketol-acid reductoisomerase [Mannheimia haemolytica PHL213]. |
| ZP_05629499 | 451 | 493 | ketol-acid reductoisomerase [Actinobacillus minor 202]. |
| ZP_07080881 | 452 | 493 | ketol-acid reductoisomerase [Sphingobacterium spiritivorum ATCC |
| | | | 33861]. |
| ZP_07337087 | 453 | 493 | ketol-acid reductoisomerase [Actinobacillus pleuropneumoniae |
| | | | serovar 6 str. Femo]. |
| ZP_07528854 | 454 | 493 | ketol-acid reductoisomerase [Actinobacillus pleuropneumoniae |
| | | | serovar 1 str. 4074]. |
| ZP_07533048 | 455 | 493 | ketol-acid reductoisomerase [Actinobacillus pleuropneumoniae |
| | | | serovar 4 str. M62]. |
| ZP_07539711 | 456 | 493 | ketol-acid reductoisomerase [Actinobacillus pleuropneumoniae |
| | | | serovar 10 str. D13039]. |
| ZP_07546145 | 457 | 493 | ketol-acid reductoisomerase [Actinobacillus pleuropneumoniae |
| | | | serovar 13 str. N273]. |
| ZP_07953211 | 458 | 493 | ketol-acid reductoisomerase [Enterobacteriaceae bacterium |
| | | | 9_2_54FAA]. |
| ZP_08066951 | 459 | 493 | ketol-acid reductoisomerase [Actinobacillus ureae ATCC 25976]. |
| ZP_08077521 | 460 | 493 | ketol-acid reductoisomerase [Succinatimonas hippei YIT 12066]. |
| ZP_08147399 | 461 | 493 | ketol-acid reductoisomerase [Haemophilus parainfluenzae ATCC |
| | | | 33392]. |
| ZP_08522240 | 462 | 493 | ketol-acid reductoisomerase [Aeromonas caviae Ae398]. |
| ZP_08756004 | 463 | 493 | ketol-acid reductoisomerase [Haemophilus pittmaniae HK 85]. |
| ADI19779 | 464 | 492 | hypothetical protein [uncultured gamma proteobacterium |
| | | | EB000_37F04]. |
| ADP11056 | 465 | 492 | ketol-acid reductoisomerase [Erwinia sp. Ejp617]. |
| ADV56009 | 466 | 492 | ketol-acid reductoisomerase [Shewanella putrefaciens 200]. |
| CBY29180 | 467 | 492 | ketol-acid reductoisomerase [Yersinia enterocolitica subsp. |
| | | | palearctica Y11]. |
| EGT77473 | 468 | 492 | ketol-acid reductoisomerase [Haemophilus haemolyticus M19501]. |
| EGT78129 | 469 | 492 | ketol-acid reductoisomerase [Haemophilus haemolyticus M21127]. |
| EGT83109 | 470 | 492 | ketol-acid reductoisomerase [Haemophilus haemolyticus M21639]. |
| EGY30102 | 471 | 492 | ketol-acid reductoisomerase [Aggregatibacter aphrophilus ATCC |
| | | | 33389]. |
| NP_438842 | 472 | 492 | ketol-acid reductoisomerase [Haemophilus influenzae Rd KW20]. |
| NP_667684 | 473 | 492 | ketol-acid reductoisomerase [Yersinia pestis KIM 10]. |
| NP_719873 | 474 | 492 | ketol-acid reductoisomerase [Shewanella oneidensis MR-1]. |
| NP_878859 | 475 | 492 | ketol-acid reductoisomerase [Candidatus Blochmannia floridanus]. |
| NP_931830 | 476 | 492 | ketol-acid reductoisomerase [Photorhabdus luminescens subsp. |
| | | | laumondii TTO1]. |
| YP_001004547 | 477 | 492 | ketol-acid reductoisomerase [Yersinia enterocolitica subsp. |
| | | | enterocolitica 8081]. |
| YP_001052367 | 478 | 492 | ketol-acid reductoisomerase [Shewanella baltica OS155]. |
| YP_001185122 | 479 | 492 | ketol-acid reductoisomerase [Shewanella putrefaciens CN-32]. |
| YP_001292610 | 480 | 492 | ketol-acid reductoisomerase [Haemophilus influenzae PittGG]. |
| YP_001368194 | 481 | 492 | ketol-acid reductoisomerase [Shewanella baltica OS185]. |
| YP_001556549 | 482 | 492 | ketol-acid reductoisomerase [Shewanella baltica OS195]. |
| YP_001906144 | 483 | 492 | ketol-acid reductoisomerase [Erwinia tasmaniensis Et1/99]. |
| YP_002359832 | 484 | 492 | ketol-acid reductoisomerase [Shewanella baltica OS223]. |
| YP_002647213 | 485 | 492 | ketol-acid reductoisomerase [Erwinia pyrifoliae Ep1/96]. |
| YP_002931578 | 486 | 492 | ketol-acid reductoisomerase [Edwardsiella ictaluri 93-146]. |
| YP_002989344 | 487 | 492 | ketol-acid reductoisomerase [Dickeya dadantii Ech703]. |
| YP_003002518 | 488 | 492 | ketol-acid reductoisomerase [Dickeya zeae Ech1591]. |
| YP_003008688 | 489 | 492 | ketol-acid reductoisomerase [Aggregatibacter aphrophilus NJ8700]. |
| YP_003019572 | 490 | 492 | ketol-acid reductoisomerase [Pectobacterium carotovorum subsp. |
| | | | carotovorum PC1]. |
| YP_003042977 | 491 | 492 | ketol-acid reductoisomerase [Photorhabdus asymbiotica subsp. |
| | | | asymbiotica ATCC 43949]. |
| YP_003248407 | 492 | 492 | ketol-acid reductoisomerase [Fibrobacter succinogenes subsp. |
| | | | succinogenes S85]. |
| YP_003261544 | 493 | 492 | ketol-acid reductoisomerase [Pectobacterium wasabiae WPP163]. |
| YP_003294152 | 494 | 492 | ketol-acid reductoisomerase [Edwardsiella tarda EIB202]. |
| YP_003335446 | 495 | 492 | ketol-acid reductoisomerase [Dickeya dadantii Ech586]. |
| YP_003470059 | 496 | 492 | ketol-acid reductoisomerase [Xenorhabdus bovienii SS-2004]. |
| YP_003529522 | 497 | 492 | ketol-acid reductoisomerase [Erwinia amylovora CFBP1430]. |
| YP_003710690 | 498 | 492 | ketol-acid reductoisomerase [Xenorhabdus nematophila ATCC |
| | | | 19061]. |
| YP_003739580 | 499 | 492 | ketol-acid reductoisomerase [Erwinia billingiae Eb661]. |
| YP_003885028 | 500 | 492 | ketol-acid reductoisomerase, NAD(P)-binding protein [Dickeya |
| | | | dadantii 3937]. |
| YP_004041287 | 501 | 492 | ketol-acid reductoisomerase [Paludibacter propionicigenes WB4]. |
| YP_004136070 | 502 | 492 | ketol-acid reductoisomerase, nad(p)-binding [Haemophilus |
| | | | influenzae F3031]. |
| YP_004296355 | 503 | 492 | ketol-acid reductoisomerase [Yersinia enterocolitica subsp. |
| | | | palearctica 105.5R(r)]. |
| YP_004365030 | 504 | 492 | ketol-acid reductoisomerase [Treponema succinifaciens DSM 2489]. |
| YP_004427401 | 505 | 492 | ketol-acid reductoisomerase [Alteromonas macleodii str. ‘Deep |
| | | | ecotype’]. |
| YP_004429149 | 506 | 492 | ketol-acid reductoisomerase [Alteromonas macleodii str. ‘Deep |
| | | | ecotype’]. |
| YP_004469651 | 507 | 492 | ketol-acid reductoisomerase [Alteromonas sp. SN2]. |
| YP_052308 | 508 | 492 | ketol-acid reductoisomerase [Pectobacterium atrosepticum |
| | | | SCRI1043]. |
| YP_068694 | 509 | 492 | ketol-acid reductoisomerase [Yersinia pseudotuberculosis IP |
| | | | 32953]. |
| YP_248373 | 510 | 492 | ketol-acid reductoisomerase [Haemophilus influenzae 86-028NP]. |
| YP_456071 | 511 | 492 | ketol-acid reductoisomerase [Sodalis glossinidius str. ‘morsitans’]. |
| YP_564413 | 512 | 492 | ketol-acid reductoisomerase [Shewanella denitrificans OS217]. |
| YP_677763 | 513 | 492 | ketol-acid reductoisomerase [Cytophaga hutchinsonii ATCC 33406]. |
| YP_732498 | 514 | 492 | ketol-acid reductoisomerase [Shewanella sp. MR-4]. |
| YP_739702 | 515 | 492 | ketol-acid reductoisomerase [Shewanella sp. MR-7]. |
| YP_868004 | 516 | 492 | ketol-acid reductoisomerase [Shewanella sp. ANA-3]. |
| YP_965114 | 517 | 492 | ketol-acid reductoisomerase [Shewanella sp. W3-18-1]. |
| ZP_01789462 | 518 | 492 | ketol-acid reductoisomerase [Haemophilus influenzae 3655]. |
| ZP_01791236 | 519 | 492 | ketol-acid reductoisomerase [Haemophilus influenzae PittAA]. |
| ZP_01797556 | 520 | 492 | ketol-acid reductoisomerase [Haemophilus influenzae R3021]. |
| ZP_03828016 | 521 | 492 | ketol-acid reductoisomerase [Pectobacterium carotovorum subsp. |
| | | | brasiliensis PBR1692]. |
| ZP_04612142 | 522 | 492 | ketol-acid reductoisomerase [Yersinia rohdei ATCC 43380]. |
| ZP_04620984 | 523 | 492 | ketol-acid reductoisomerase [Yersinia aldovae ATCC 35236]. |
| ZP_04626075 | 524 | 492 | ketol-acid reductoisomerase [Yersinia kristensenii ATCC 33638]. |
| ZP_04633131 | 525 | 492 | ketol-acid reductoisomerase [Yersinia frederiksenii ATCC 33641]. |
| ZP_04637919 | 526 | 492 | ketol-acid reductoisomerase [Yersinia intermedia ATCC 29909]. |
| ZP_04957910 | 527 | 492 | ketol-acid reductoisomerase [gamma proteobacterium NOR51-B]. |
| ZP_05850757 | 528 | 492 | ketol-acid reductoisomerase [Haemophilus influenzae NT127]. |
| ZP_06127160 | 529 | 492 | ketol-acid reductoisomerase [Providencia rettgeri DSM 1131]. |
| ZP_06716193 | 530 | 492 | ketol-acid reductoisomerase [Edwardsiella tarda ATCC 23685]. |
| ZP_07393823 | 531 | 492 | ketol-acid reductoisomerase [Shewanella baltica OS183]. |
| ZP_07890225 | 532 | 492 | ketol-acid reductoisomerase [Aggregatibacter segnis ATCC 33393]. |
| ZP_08726579 | 533 | 492 | ketol-acid reductoisomerase [Haemophilus haemolyticus M21621]. |
| AAA24029 | 534 | 491 | acetohydroxy acid isomeroreductase [Escherichia coli]. |
| AAC38126 | 535 | 491 | acetohydroxy acid isomeroreductase [Buchnera aphidicola]. |
| ADI18763 | 536 | 491 | ketol-acid reductoisomerase [uncultured gamma proteobacterium |
| | | | HF4000_36I10]. |
| ADR29158 | 537 | 491 | ketol-acid reductoisomerase [Escherichia coli O83:H1 str. NRG |
| | | | 857C]. |
| AEK00748 | 538 | 491 | ketol-acid reductoisomerase [Klebsiella pneumoniae KCTC 2242]. |
| BAH82904 | 539 | 491 | ketol-acid reductoisomerase [Candidatus Ishikawaella capsulata |
| | | | Mpkobe]. |
| CBA71826 | 540 | 491 | ketol-acid reductoisomerase [Arsenophonus nasoniae]. |
| EFW51086 | 541 | 491 | ketol-acid reductoisomerase [Shigella dysenteriae CDC 74-1112]. |
| EFW53045 | 542 | 491 | ketol-acid reductoisomerase [Shigella boydii ATCC 9905]. |
| EFZ59021 | 543 | 491 | ketol-acid reductoisomerase [Escherichia coli LT-68]. |
| EGB59513 | 544 | 491 | ketol-acid reductoisomerase [Escherichia coli M863]. |
| EGP04347 | 545 | 491 | ketol-acid reductoisomerase [Pasteurella multocida subsp. |
| | | | multocida str. Anand1_goat]. |
| EGW63513 | 546 | 491 | ketol-acid reductoisomerase [Escherichia coli STEC_C165-02]. |
| EGX01490 | 547 | 491 | ketol-acid reductoisomerase [Escherichia coli STEC_MHI813]. |
| NP_246221 | 548 | 491 | ketol-acid reductoisomerase [Pasteurella multocida subsp. |
| | | | multocida str. Pm70]. |
| NP_290405 | 549 | 491 | ketol-acid reductoisomerase [Escherichia coli O157:H7 str. |
| | | | EDL933]. |
| NP_418222 | 13 | 491 | ketol-acid reductoisomerase, NAD(P)-binding [Escherichia coli str. |
| | | | K-12 substr. MG1655]. |
| NP_457839 | 550 | 491 | ketol-acid reductoisomerase [Salmonella enterica subsp. enterica |
| | | | serovar Typhi str. CT18]. |
| NP_462800 | 551 | 491 | ketol-acid reductoisomerase [Salmonella enterica subsp. enterica |
| | | | serovar Typhimurium str. LT2]. |
| NP_660898 | 552 | 491 | ketol-acid reductoisomerase [Buchnera aphidicola str. Sg |
| | | | (Schizaphis graminum)]. |
| NP_778135 | 553 | 491 | ketol-acid reductoisomerase [Buchnera aphidicola str. Bp (Baizongia |
| | | | pistaciae)]. |
| NP_839100 | 554 | 491 | ketol-acid reductoisomerase [Shigella flexneri 2a str. 2457T]. |
| YP_001178715 | 555 | 491 | ketol-acid reductoisomerase [Enterobacter sp. 638]. |
| YP_001337912 | 556 | 491 | ketol-acid reductoisomerase [Klebsiella pneumoniae subsp. |
| | | | pneumoniae MGH 78578]. |
| YP_001439809 | 557 | 491 | ketol-acid reductoisomerase [Cronobacter sakazakii ATCC BAA- |
| | | | 894]. |
| YP_001451723 | 558 | 491 | ketol-acid reductoisomerase [Citrobacter koseri ATCC BAA-895]. |
| YP_001480972 | 559 | 491 | ketol-acid reductoisomerase [Serratia proteamaculans 568]. |
| YP_001572687 | 560 | 491 | ketol-acid reductoisomerase [Salmonella enterica subsp. arizonae |
| | | | serovar 62:z4, z23:—str. RSK2980]. |
| YP_002043148 | 561 | 491 | ketol-acid reductoisomerase [Salmonella enterica subsp. enterica |
| | | | serovar Newport str. SL254]. |
| YP_002148837 | 562 | 491 | ketol-acid reductoisomerase [Salmonella enterica subsp. enterica |
| | | | serovar Agona str. SL483]. |
| YP_002152990 | 563 | 491 | ketol-acid reductoisomerase [Proteus mirabilis HI4320]. |
| YP_002217848 | 564 | 491 | ketol-acid reductoisomerase [Salmonella enterica subsp. enterica |
| | | | serovar Dublin str. CT_02021853]. |
| YP_002241161 | 565 | 491 | ketol-acid reductoisomerase [Klebsiella pneumoniae 342]. |
| YP_002384790 | 566 | 491 | ketol-acid reductoisomerase [Escherichia fergusonii ATCC 35469]. |
| YP_002405159 | 567 | 491 | ketol-acid reductoisomerase [Escherichia coli 55989]. |
| YP_002408941 | 568 | 491 | ketol-acid reductoisomerase [Escherichia coli IAI39]. |
| YP_003195874 | 569 | 491 | ketol-acid reductoisomerase [Robiginitalea biformata HTCC2501]. |
| YP_003208576 | 570 | 491 | ketol-acid reductoisomerase [Cronobacter turicensis z3032]. |
| YP_003367410 | 571 | 491 | ketol-acid reductoisomerase [Citrobacter rodentium ICC168]. |
| YP_003522118 | 572 | 491 | IlvC [Pantoea ananatis LMG 20103]. |
| YP_003615479 | 573 | 491 | ketol-acid reductoisomerase (Acetohydroxy-acidisomeroreductase) |
| | | | [Enterobacter cloacae subsp. cloacae ATCC 13047]. |
| YP_003863317 | 574 | 491 | ketol-acid reductoisomerase [Maribacter sp. HTCC2170]. |
| YP_003932703 | 575 | 491 | ketol-acid reductoisomerase [Pantoea vagans C9-1]. |
| YP_003943772 | 576 | 491 | ketol-acid reductoisomerase [Enterobacter cloacae SCF1]. |
| YP_004117680 | 577 | 491 | ketol-acid reductoisomerase [Pantoea sp. At-9b]. |
| YP_004166417 | 578 | 491 | ketol-acid reductoisomerase [Cellulophaga algicola DSM 14237]. |
| YP_004196697 | 579 | 491 | ketol-acid reductoisomerase [Desulfobulbus propionicus DSM |
| | | | 2032]. |
| YP_004214982 | 580 | 491 | ketol-acid reductoisomerase [Rahnella sp. Y9602]. |
| YP_004263437 | 581 | 491 | ketol-acid reductoisomerase [Cellulophaga lytica DSM 7489]. |
| YP_004419833 | 582 | 491 | ketol-acid reductoisomerase [Gallibacterium anatis UMN179]. |
| YP_004591751 | 583 | 491 | ketol-acid reductoisomerase [Enterobacter aerogenes KCTC 2190]. |
| YP_004732250 | 584 | 491 | ketol-acid reductoisomerase [Salmonella bongori NCTC 12419]. |
| YP_004738981 | 585 | 491 | ketol-acid reductoisomerase [Zobellia galactanivorans]. |
| YP_004789690 | 586 | 491 | ketol-acid reductoisomerase [Muricauda ruestringensis DSM |
| | | | 13258]. |
| YP_004830786 | 587 | 491 | ketol-acid reductoisomerase [Enterobacter asburiae LF7a]. |
| YP_278087 | 588 | 491 | ketol-acid reductoisomerase [Candidatus Blochmannia |
| | | | pennsylvanicus str. BPEN]. |
| YP_312707 | 589 | 491 | ketol-acid reductoisomerase [Shigella sonnei Ss046]. |
| YP_405393 | 590 | 491 | ketol-acid reductoisomerase [Shigella dysenteriae Sd197]. |
| YP_671834 | 591 | 491 | ketol-acid reductoisomerase [Escherichia coli 536]. |
| YP_859360 | 592 | 491 | ketol-acid reductoisomerase [Escherichia coli APEC O1]. |
| YP_862142 | 593 | 491 | ketol-acid reductoisomerase [Gramella forsetii KT0803]. |
| ZP_01076547 | 594 | 491 | ketol-acid reductoisomerase (Acetohydroxy-acid |
| | | | isomeroreductase)(Alpha-keto-beta-hydroxylacil reductoisomerase) |
| | | | [Marinomonas sp. MED121]. |
| ZP_01117623 | 595 | 491 | ketol-acid reductoisomerase [Polaribacter irgensii 23-P]. |
| ZP_01135114 | 596 | 491 | ketol-acid reductoisomerase [Pseudoalteromonas tunicata D2]. |
| ZP_01167291 | 597 | 491 | ketol-acid reductoisomerase [Neptuniibacter caesariensis]. |
| ZP_01216197 | 598 | 491 | ketol-acid reductoisomerase [Psychromonas sp. CNPT3]. |
| ZP_01618023 | 599 | 491 | ketol-acid reductoisomerase [marine gamma proteobacterium |
| | | | HTCC2143]. |
| ZP_01899004 | 600 | 491 | ketol-acid reductoisomerase [Moritella sp. PE36]. |
| ZP_02347072 | 601 | 491 | ketol-acid reductoisomerase [Salmonella enterica subsp. enterica |
| | | | serovar Saintpaul str. SARA29]. |
| ZP_02659286 | 602 | 491 | ketol-acid reductoisomerase [Salmonella enterica subsp. enterica |
| | | | serovar Kentucky str. CDC 191]. |
| ZP_02663422 | 603 | 491 | ketol-acid reductoisomerase (Acetohydroxy-acidisomeroreductase) |
| | | | [Salmonella enterica subsp. enterica serovar Schwarzengrund str. |
| | | | SL480]. |
| ZP_02669892 | 604 | 491 | ketol-acid reductoisomerase [Salmonella enterica subsp. enterica |
| | | | serovar Heidelberg str. SL486]. |
| ZP_02701512 | 605 | 491 | ketol-acid reductoisomerase [Salmonella enterica subsp. enterica |
| | | | serovar Newport str. SL317]. |
| ZP_02904315 | 606 | 491 | ketol-acid reductoisomerase [Escherichia albertii TW07627]. |
| ZP_03001355 | 607 | 491 | ketol-acid reductoisomerase [Escherichia coli 53638]. |
| ZP_03027948 | 608 | 491 | ketol-acid reductoisomerase [Escherichia coli B7A]. |
| ZP_03066877 | 609 | 491 | ketol-acid reductoisomerase [Shigella dysenteriae 1012]. |
| ZP_03214352 | 610 | 491 | ketol-acid reductoisomerase [Salmonella enterica subsp. enterica |
| | | | serovar Virchow str. SL491]. |
| ZP_03318332 | 611 | 491 | hypothetical protein PROVALCAL_01263 [Providencia |
| | | | alcalifaciens DSM 30120]. |
| ZP_03701316 | 612 | 491 | ketol-acid reductoisomerase [Flavobacteria bacterium MS024-3C]. |
| ZP_03802251 | 613 | 491 | hypothetical protein PROPEN_00591 [Proteus penneri ATCC |
| | | | 35198]. |
| ZP_03841558 | 614 | 491 | ketol-acid reductoisomerase [Proteus mirabilis ATCC 29906]. |
| ZP_04558381 | 615 | 491 | ketol-acid reductoisomerase [Citrobacter sp. 30_2]. |
| ZP_04656754 | 616 | 491 | ketol-acid reductoisomerase [Salmonella enterica subsp. enterica |
| | | | serovar Tennessee str. CDC07-0191]. |
| ZP_05919862 | 617 | 491 | ketol-acid reductoisomerase [Pasteurella dagmatis ATCC 43325]. |
| ZP_05970899 | 618 | 491 | ketol-acid reductoisomerase [Enterobacter cancerogenus ATCC |
| | | | 35316]. |
| ZP_05972917 | 619 | 491 | ketol-acid reductoisomerase [Providencia rustigianii DSM 4541]. |
| ZP_06192833 | 620 | 491 | ketol-acid reductoisomerase [Serratia odorifera 4Rx13]. |
| ZP_06354288 | 621 | 491 | ketol-acid reductoisomerase [Citrobacter youngae ATCC 29220]. |
| ZP_06637791 | 622 | 491 | ketol-acid reductoisomerase [Serratia odorifera DSM 4582]. |
| ZP_07167619 | 623 | 491 | ketol-acid reductoisomerase [Escherichia coli MS 175-1]. |
| ZP_07379857 | 624 | 491 | ketol-acid reductoisomerase [Pantoea sp. aB]. |
| ZP_07593268 | 625 | 491 | ketol-acid reductoisomerase [Escherichia coli W]. |
| ZP_07783697 | 626 | 491 | ketol-acid reductoisomerase [Escherichia coli 2362-75]. |
| ZP_08039786 | 627 | 491 | ketol-acid reductoisomerase, NAD(P)-binding [Serratia symbiotica |
| | | | str. Tucson]. |
| ZP_08253005 | 628 | 491 | ketol-acid reductoisomerase [Plautia stali symbiont]. |
| ZP_08371457 | 629 | 491 | ketol-acid reductoisomerase (Acetohydroxy-acidisomeroreductase) |
| | | | (Alpha-keto-beta-hydroxylacil reductoisomerase) [Escherichia coli |
| | | | TA271]. |
| ZP_08495823 | 630 | 491 | ketol-acid reductoisomerase [Enterobacter hormaechei ATCC |
| | | | 49162]. |
| ZP_08571682 | 631 | 491 | ketol-acid reductoisomerase [Rheinheimera sp. A13L]. |
| ADP66401 | 632 | 490 | ketol-acid reductoisomerase [Buchnera aphidicola str. LL01 |
| | | | (Acyrthosiphon pisum)]. |
| ADP67563 | 633 | 490 | ketol-acid reductoisomerase [Buchnera aphidicola str. JF99 |
| | | | (Acyrthosiphon pisum)]. |
| AEO08356 | 634 | 490 | ketol-acid reductoisomerase [Buchnera aphidicola str. Ua |
| | | | (Uroleucon ambrosiae)]. |
| AEO08924 | 635 | 490 | ketol-acid reductoisomerase [Buchnera aphidicola str. Ak |
| | | | (Acyrthosiphon kondoi)]. |
| EHA15408 | 636 | 490 | ketol-acid reductoisomerase [Halomonas sp. HAL1]. |
| ILVC_BUCMH | 637 | 490 | RecName: Full = Ketol-acid reductoisomerase; AltName: |
| | | | Full = Acetohydroxy-acid isomeroreductase; AltName: Full = Alpha- |
| | | | keto-beta-hydroxylacil reductoisomerase [Buchnera aphidicola] |
| NP_240398 | 638 | 490 | ketol-acid reductoisomerase [Buchnera aphidicola str. APS |
| | | | (Acyrthosiphon pisum)]. |
| YP_001342680 | 639 | 490 | ketol-acid reductoisomerase [Marinomonas sp. MWYL1]. |
| YP_002139558 | 640 | 490 | ketol-acid reductoisomerase [Geobacter bemidjiensis Bem]. |
| YP_002603369 | 641 | 490 | ketol-acid reductoisomerase [Desulfobacterium autotrophicum |
| | | | HRM2]. |
| YP_003021297 | 642 | 490 | ketol-acid reductoisomerase [Geobacter sp. M21]. |
| YP_004069265 | 643 | 490 | ketol-acid reductoisomerase [Pseudoalteromonas sp. SM9913]. |
| YP_004199351 | 644 | 490 | ketol-acid reductoisomerase [Geobacter sp. M18]. |
| YP_004313466 | 645 | 490 | ketol-acid reductoisomerase [Marinomonas mediterranea MMB-1]. |
| YP_004429587 | 646 | 490 | ketol-acid reductoisomerase [Krokinobacter sp. 4H-3-7-5]. |
| YP_004482911 | 647 | 490 | ketol-acid reductoisomerase [Marinomonas posidonica IVIA-Po- |
| | | | 181]. |
| YP_339373 | 648 | 490 | ketol-acid reductoisomerase [Pseudoalteromonas haloplanktis |
| | | | TAC125]. |
| YP_357926 | 649 | 490 | ketol-acid reductoisomerase [Pelobacter carbinolicus DSM 2380]. |
| YP_802928 | 650 | 490 | ketol-acid reductoisomerase [Buchnera aphidicola str. Cc (Cinara |
| | | | cedri)]. |
| ZP_01053665 | 651 | 490 | ketol-acid reductoisomerase [Polaribacter sp. MED152]. |
| ZP_01104734 | 652 | 490 | ketol-acid reductoisomerase [Congregibacter litoralis KT71]. |
| ZP_01313517 | 653 | 490 | ketol-acid reductoisomerase [Desulfuromonas acetoxidans DSM |
| | | | 684]. |
| ZP_01613990 | 654 | 490 | ketol-acid reductoisomerase [Alteromonadales bacterium TW-7]. |
| ZP_03702229 | 655 | 490 | ketol-acid reductoisomerase [Flavobacteria bacterium MS024-2A]. |
| ZP_05096116 | 656 | 490 | ketol-acid reductoisomerase, putative [marine gamma |
| | | | proteobacterium HTCC2148]. |
| ZP_05129242 | 657 | 490 | ketol-acid reductoisomerase [gamma proteobacterium NOR5-3]. |
| ZP_08410735 | 658 | 490 | ketol-acid reductoisomerase [Pseudoalteromonas haloplanktis |
| | | | ANT/505]. |
| ZP_08568206 | 659 | 490 | ketol-acid reductoisomerase [Shewanella sp. HN-41]. |
| ADI23720 | 660 | 489 | ketol-acid reductoisomerase [uncultured Oceanospirillales bacterium |
| | | | HF4000_21D01]. |
| ILVC_BUCDN | 661 | 489 | RecName: Full = Ketol-acid reductoisomerase; AltName: |
| | | | Full = Acetohydroxy-acid isomeroreductase; AltName: Full = Alpha- |
| | | | keto-beta-hydroxylacil reductoisomerase [Buchnera aphidicola]. |
| ILVC_BUCSC | 662 | 489 | RecName: Full = Ketol-acid reductoisomerase; AltName: |
| | | | Full = Acetohydroxy-acid isomeroreductase; AltName: Full = Alpha- |
| | | | keto-beta-hydroxylacil reductoisomerase [Buchnera aphidicola]. |
| YP_001195200 | 663 | 489 | ketol-acid reductoisomerase [Flavobacterium johnsoniae UW101]. |
| YP_004739827 | 664 | 489 | alpha-keto-beta-hydroxylacil reductoisomerase [Capnocytophaga |
| | | | canimorsus Cc5]. |
| ZP_01627670 | 665 | 489 | ketol-acid reductoisomerase [marine gamma proteobacterium |
| | | | HTCC2080]. |
| ZP_01873277 | 666 | 489 | ketol-acid reductoisomerase [Lentisphaera araneosa HTCC2155]. |
| ZP_01890129 | 667 | 489 | ketol-acid reductoisomerase [unidentified eubacterium SCB49]. |
| YP_004590210 | 668 | 488 | ketol-acid reductoisomerase [Buchnera aphidicola (Cinara |
| | | | tujafilina)]. |
| ZP_01253273 | 669 | 476 | ketol-acid reductoisomerase [Psychroflexus torquis ATCC 700755]. |
| EGX01646 | 670 | 469 | ketol-acid reductoisomerase [Escherichia coli G58-1]. |
| YP_003585316 | 671 | 469 | ketol-acid reductoisomerase [Zunongwangia profunda SM-A87]. |
| ZP_08269825 | 672 | 467 | ketol-acid reductoisomerase [gamma proteobacterium IMCC3088]. |
| ZP_03342290 | 673 | 463 | ketol-acid reductoisomerase, partial [Salmonella enterica subsp. |
| | | | enterica serovar Typhi str. 404ty]. |
| ZP_03378451 | 674 | 452 | ketol-acid reductoisomerase [Salmonella enterica subsp. enterica |
| | | | serovar Typhi str. J185]. |
| ZP_01785421 | 675 | 450 | ketol-acid reductoisomerase [Haemophilus influenzae 22.1-21]. |
| EGP05382 | 676 | 442 | ketol-acid reductoisomerase [Pasteurella multocida subsp. gallicida |
| | | | str. Anand1_poultry]. |

### Example 27

### NADH-Dependent KARI Derived from Shewanella and Salmonella

[0634] The following example illustrates exemplary long-form KARI enzymes from Shewanella sp. and Salmonella enterica and corresponding NADH-dependent ketol-acid reductoisomerases (NKR) derived therefrom.

[0635] Plasmids and primers disclosed in this example are shown in Tables 45-46 below.

TABLE 45
Plasmids Disclosed in Example 27.

| Plasmids | Genotype |
|---|---|
| pET22b(+) | PT7, bla, ori pBR322, lacI, C-term 6xHis |
| pGV3195 | PT7::Se1_KARI^{his6}, bla, oripBR322, lacI |
| pGV3627 | PT7::Sh_sp_KARI_coSc^{his6}, bla, oripBR322, lacI |
| pGV3628 | PT7::Sh_sp_NKR_coSc^{DDhis6}, bla, oripBR322, |
| | lacI |
| pGVSh_sp_S78D | PT7::Sh_sp_KARI_coSc^{S78Dhis6}, bla, oripBR322, |
| | lacI |
| pGV3629 | PT7::Sh_sp_NKR_coSc^{6E6his6}, bla, oripBR322, |
| | lacI |
| pGV3630 | PT7::Se2_KARI_coSc^{his6}, bla, oripBR322, lacI |
| pGVSe2_S78D | PT7::Se2_KARI_coSc^{S78Dhis6}, bla, oripBR322, |
| | lacI |
| pGV3631 | PT7::Se2_NKR_coSc^{DDhis6}, bla, oripBR322, lacI |
| pGV3632 | PT7::Se2_NKR_coSc^{6E6his6}, bla, oripBR322, lacI |

TABLE 46
Oligonucleotide Primers Disclosed in Example 27.

| Primer | |
|---|---|
| name | Sequence |
| Sh_S78D_for | GCACAAAAGAGAGCCGATTGGCAAAAAGCGAC |
| | (SEQ ID NO: 677) |
| Sh_S78D_rev | GTCGCTTTTTGCCAATCGGCTCTCTTTTGTGC |
| | (SEQ ID NO: 678) |
| Se2_S78D_for | GCAGAAAAGAGAGCCGATTGGCGTAAAGCGACGGA |
| | (SEQ ID NO: 679) |
| Se2_S78D_rev | TCCGTCGCTTTACGCCAATCGGCTCTCTTTTCTGC |
| | (SEQ ID NO: 680) |

[0636] Mutations relative to wild-type Salmonella enterica KARI (Se2_KARI) and Shewanella sp. KARI (Sh_sp_KARI) are listed in Table 47 below.

TABLE 47
Mutations Relative to Se2_KARI and Sh_KARI.

| Source | Variant (enzyme) | Mutations |
|---|---|---|
| Salmenella enterica | Se2_KARI | n/a |
| | Se2_KARI^{S78D} | S78D |
| | Se2_NKR^{DD} | R76D, S78D |
| | Se2_NKR^{6E6} | A71S, R76D, S78D, Q110V |
| Shewanella sp. | Sh_sp_KARI | n/a |
| | Sh_sp_NKR^{S78D} | S78D |
| | Sh_sp_NKR^{DD} | R76D, S78D |
| | Sh_sp_NKR^{6E6} | A71S, R76D, S78D, Q110V |

[0637] Genes encoding Se2_KARI, Se2_NKR^{DD}, Se2_NKR^{6E6}, Sh_sp_KARI, Sh_sp_NKR^{DD}, and Sh_sp_NKR^{6E6} were synthesized by GenScript USA Inc. (Piscataway, N.J. 08854 USA) with flanking NdeI and XhoI sites. The genes were isolated by restriction enzyme digestion with NdeI and XhoI for 1 hour at 37° C. The expression vector, pGV3195 (FIG. 52), was also digested with NdeI and XhoI for 1 hour at 37° C. The fragments were ligated using T4 DNA ligase from New England Biolabs (Ipswich, Mass. USA). The ligated DNAs were transformed into chemically competent E. coli DH5α cells, incubated for 1 h at 37° C. in SOC medium, and plated to LBₐₘₚ agar plates (Luria Bertani Broth, Research Products International Corp, supplemented with 100 μg/mL ampicillin) to yield single colonies. After confirming the correct sequence, E. coli BL21(DE3) (Table 3) cells were transformed with the correct plasmids for expression

[0638] Genes encoding Se2_KARI^{S78D} and Sh_sp_NKR^{S78D}: Single aspartic acid substitutions were introduced using the QuikChange site-directed mutagenesis kit according to manufacturer's protocol (Stratagene). Plasmids pGV3627 and pGV3630 encoding Sh_sp_KARI and Se2_KARI, respectively, were used as templates. The respective primer pairs were primers Sh_S78D_for and Sh_S78D_rev and primers Se2_S78D_for and Se2_S78D_rev. Pfu turbo polymerase (Stratagene) was used as the polymerase in the following PCR program: 95° C. for 2 min; 95° C. for 30 s, 55° C. for 30 s, 72° C. for 8 min (repeat 15 times); 72° C. for 10 min. After the PCR program was completed, the reaction mixtures were digested with DpnI for 1 h at 37° C. Then, chemically competent E. coli XL1-Gold cells were transformed with 3 μL of the un-cleaned PCR mixtures and the cells were allowed to recover in SOC medium at 37° C. with shaking at 250 rpm for 1 h. The recovery allowed the cells to close the nick-containing DNA produced during the PCR and thus to generate circularized plasmids. We then plated varying volumes on LBₐₘₚ agar plates (Luria Bertani Broth, Research Products International Corp, supplemented with 100 μg/mL ampicillin) to yield single colonies. After confirming the correct sequence, E. coli BL21 (DE3) cells were transformed with the correct plasmids for expression.

[0639] Heterologous expression of Se2_KARI and Sh_sp_KARI variants in E. coli: The expression of Se2_KARI, Sh_sp_KARI, and their corresponding NKR variants (Table 47) was conducted in 0.5 L Erlenmeyer flasks filled with 0.2 L LBₐₘₚ (Luria Bertani Broth, Research Products International Corp, supplemented with 100 μg/mL ampicillin) inoculated with overnight culture to an initial OD₆₀₀ of 0.1. After growing the expression cultures at 37° C. with shaking at 250 rpm for 4 h, the cultivation temperature was dropped to 25° C., and KARI expression was induced with IPTG to a final concentration of 0.5 mM. After 24 h at 25° C. and shaking at 250 rpm, the cells were pelleted at 5,300 g for 10 min and then frozen at −20° C. until further use.

[0640] Histrap purification of KARI^{hiS6} variants: Cell pellets used for purification were resuspended in purification buffer A (20 mM Tris, 20 mM imidazole, 100 mM NaCl, 10 mM MgCl2, pH 7.4). KARI enzymes and their corresponding NKR variants were purified by IMAC (Immobilized metal affinity chromatography) over a 1-ml Histrap High Performance (histrap HP) column pre-charged with Nickel (GE Healthcare) using an AKTApurifier™ FPLC system (GE Healthcare). The column was equilibrated with four column volumes (cv) of buffer A. After injecting the crude extract, the column was washed with buffer A for 2 cv, followed by a wash step with a mixture of 10% elution buffer B (20 mM Tris, 300 mM imidazole, 100 mM NaCl, 10 mM MgCl2, pH 7.4) for 5 cv. KARI enzymes and their corresponding NKR variants were eluted at 40% buffer B and stored at 4° C.

[0641] Preparation of enantiopure (S)-2-acetolactate: Enzymatic synthesis of (S)-2-acetolactate was performed in an anaerobic flask. The reaction was carried out in a total volume of 55 mL containing 20 mM potassium phosphate buffer, pH 7.0, 1 mM MgCl₂, 0.05 mM thiamine pyrophosphate (TPP), and 200 mM sodium pyruvate. The synthesis was initiated by the addition of 65 units of purified B. subtilis acetolactate synthase (Bs_AlsS), and the reaction was incubated at 30° C. (in a static incubator) for 7.5 hours. A buffer exchange was performed on the purified Bs_AlsS before the synthesis to remove as much glycerol as possible. This was done using a microcon filter with a 50 kDa nominal molecular weight cutoff membrane to filter 0.5 mL of the purified enzyme until only 50 μL were left on top of the membrane. 450 μL of 20 mM KPO₄ pH 7.0, 1 mM MgCl₂, and 0.05 mM TPP were then added to the membrane and filtered again, this process was repeated three times. The final acetolactate concentration was determined by liquid chromatography and was 218 mM in this batch used here.

[0642] KARI assay in 1-mL scale with the purpose to measure the NADPH and NADH K_{M} values: Activities KARI enzymes and their corresponding NKR variants were assayed kinetically by monitoring the decrease in NADPH or NADH concentration by measuring the change in absorbance at 340 nm. An assay buffer was prepared containing 100 mM potassium phosphate pH 7.0, 1 mM DTT, 10 mM (S)-2-acetolactate, and 10 mM MgCl₂ (final concentrations in the 1-mL assay, accounting for dilution with enzyme and cofactor). Fifty μL purified enzyme and 930 μL of the assay buffer were placed into a 1-mL cuvette. The reaction was initiated by addition of 20 μL NADPH or NADH (200 μM final concentration) for a general activity assay. Michaelis-Menten constants of the cofactors were determined with varying concentrations of NADPH or NADH (6-200 μM final concentrations).

[0643] Protein quantification: For determination of the specific activity values, we quantified the protein concentration of the purified enzymes using the BioRad Bradford Protein Assay Reagent Kit (Cat#500-0006, BioRad Laboratories) using BSA for the standard curve.

[0644] Sh_sp_KARI and its NKR variants were expressed in 200-mL cultures and purified over a 1-mL histrap HP column. The K_{M}, k_{cat}, and specific acitivity values were measured as described above, and the results are summarized in Table 48. In terms of the ratio of catalytic efficiency with NADH over NADPH, variants Sh_sp_NKR^{S78D}, Sh_sp_NKR^{R76DS78D}, and Sh_sp_NKR^{6E6} can be defined as being NADH-dependent KARIs (NKR) in terms of their catalytic efficiencies.

[0645] Se2_KARI and its NKR variants were expressed in 200-mL cultures and purified over a 1-mL histrap HP column. The K_{M}, k_{cat}, and specific acitivity values were measured as described above, and the results are summarized in Table 49. In terms of the ratio of catalytic efficiency with NADH over NADPH, variants Se2_NKR^{DD} and Se2_NKR^{6E6} can be defined as being NADH-dependent KARIs (NKR).

TABLE 48
Comparison of properties of wild-type Shewanella sp. KARI (Sh_sp_KARI), the single and double
aspartic acid variants, and the “6E6” variant. Data is based on measurements using purified proteins.

| | Sp. Activity [U/mg] | | | | | | Kₘ [μM] for cofactor | | | |
|---|---|---|---|---|---|---|---|---|---|---|
| | NADH | ± | NADPH | ± | ratio | ± | NADH | ± | NADPH | ± |
| Sh_sp_KARI | 0.30 | 0.012 | 1.2 | 0.013 | 0.2 | 0.0 | 415 | 44 | ≦1 | |
| Sh_sp_NKR^{S78D} | 0.36 | 0.024 | 0.5 | 0.042 | 0.7 | 0.1 | 130 | 15 | 267 | 26 |
| Sh_sp_NKR^{DD} | 0.34 | 0.001 | 0.03 | 0.004 | 10.7 | 1.5 | 90 | 24 | >1000 | |
| Sh_sp_NKR^{6E6} | 0.66 | 0.00 | 0.1 | 0.013 | 9.1 | 1.7 | 75 | 10 | 600 | 130 |

| | k_{cat} [^{s-1}] | | | | k_{cat}/Kₘ [M⁻¹ * s⁻¹] | | | | | |
|---|---|---|---|---|---|---|---|---|---|---|
| | NADH | ± | NADPH | ± | NADH | ± | NADPH | ± | ratio | ± |
| Sh_sp_KARI | 1.1 | 0.05 | 4.5 | 0.05 | 2,649 | 301 | 4,479,890 | | 0.0006 | |
| Sh_sp_NKR^{S78D} | 1.3 | 0.09 | 2.0 | 0.16 | 10,269 | 1,360 | 7,373 | 924 | 1.4 | 0.3 |
| Sh_sp_NKR^{DD} | 1.3 | 0.01 | 0.1 | 0.02 | 14,022 | 3,740 | <117 | | 119 | |
| Sh_sp_NKR^{6E6} | 2.4 | 0.00 | 0.3 | 0.05 | 32,410 | 4,322 | 446 | 127 | 73 | 22.9 |

TABLE 49
Comparison of properties of wild-type Salmonella enterica KARI (Se2_KARI), the single and double
aspartic acid variants, and the “6E6” variant. Data is based on measurements using purified proteins.

| | Sp. Activity [U/mg] | | | | | | Kₘ [μM] for cofactor | | | |
|---|---|---|---|---|---|---|---|---|---|---|
| | NADH | ± | NADPH | ± | ratio | ± | NADH | ± | NADPH | ± |
| Se2_KARI | 0.14 | 0.009 | 1.1 | 0.062 | 0.1 | 0.0 | 157 | 4 | 8 | 2 |
| Se2_NKR^{S78D} | 0.17 | 0.005 | 0.4 | 0.015 | 0.4 | 0.0 | 233 | 43 | 272 | 23 |
| Se2_NKR^{DD} | 0.37 | 0.002 | 0.03 | 0.005 | 12.4 | 1.9 | 121 | 20 | >1000 | |
| Se2_NKR^{6E6} | 0.64 | 0.10 | 0.1 | 0.045 | 6.6 | 3.2 | 24 | 4 | 630 | 291 |

| | k_{cat} [^{s-1}] | | | | k_{cat}/Kₘ [M⁻¹ * s⁻¹] | | | | | |
|---|---|---|---|---|---|---|---|---|---|---|
| | NADH | ± | NADPH | ± | NADH | ± | NADPH | ± | ratio | ± |
| Se2_KARI | 0.51 | 0.03 | 3.96 | 0.23 | 3,229 | 222 | 495,409 | 127,118 | 0.01 | 0.0 |
| Se2_NKR^{S78D} | 0.63 | 0.02 | 1.47 | 0.05 | 2,696 | 503 | 5,402 | 498 | 0.5 | 0.1 |
| Se2_NKR^{DD} | 1.36 | 0.01 | 0.11 | 0.02 | 11,222 | 1,856 | <110 | | >102 | |
| Se2_NKR^{6E6} | 2.33 | 0.35 | 0.36 | 0.01 | 97,284 | 21,857 | 565 | 261 | 172 | 88.5 |

[0646] The foregoing detailed description has been given for clearness of understanding only and no unnecessary limitations should be understood there from as modifications will be obvious to those skilled in the art.

[0647] While the invention has been described in connection with specific embodiments thereof, it will be understood that it is capable of further modifications and this application is intended to cover any variations, uses, or adaptations of the invention following, in general, the principles of the invention and including such departures from the present disclosure as come within known or customary practice within the art to which the invention pertains and as may be applied to the essential features hereinbefore set forth and as follows in the scope of the appended claims.

[0648] The disclosures, including the claims, figures and/or drawings, of each and every patent, patent application, and publication cited herein are hereby incorporated herein by reference in their entireties.

The application's sequence listing, which the Patent Office published only in electronic form, follows.

SEQUENCE LISTING (680 sequences)

SEQ ID NO: 1 - DNA, 1533 bp, Escherichia coli
atgcgaattggcataccaagagaacggttaaccaatgaaacccgtgttgcagcaacgccaaaaacagtggaacagctgctgaaactgggttttaccgtcgcggtagagagcggcgcgggtcaactggcaagttttgacgataaagcgtttgtgcaagcgggcgctgaaattgtagaagggaatagcgtctggcagtcagagatcattctgaaggtcaatgcgccgttagatgatgaaattgcgttactgaatcctgggacaacgctggtgagttttatctggcctgcgcagaatccggaattaatgcaaaaacttgcggaacgtaacgtgaccgtgatggcgatggactctgtgccgcgtatctcacgcgcacaatcgctggacgcactaagctcgatggcgaacatcgccggttatcgcgccattgttgaagcggcacatgaatttgggcgcttctttaccgggcaaattactgcggccgggaaagtgccaccggcaaaagtgatggtgattggtgcgggtgttgcaggtctggccgccattggcgcagcaaacagtctcggcgcgattgtgcgtgcattcgacacccgcccggaagtgaaagaacaagttcaaagtatgggcgcggaattcctcgagctggattttaaagaggaagctggcagcggcgatggctatgccaaagtgatgtcggacgcgttcatcaaagcggaaatggaactctttgccgcccaggcaaaagaggtcgatatcattgtcaccaccgcgcttattccaggcaaaccagcgccgaagctaattacccgtgaaatggttgactccatgaaggcgggcagtgtgattgtcgacctggcagcccaaaacggcggcaactgtgaatacaccgtgccgggtgaaatcttcactacggaaaatggtgtcaaagtgattggttataccgatcttccgggccgtctgccgacgcaatcctcacagctttacggcacaaacctcgttaatctgctgaaactgttgtgcaaagagaaagacggcaatatcactgttgattttgatgatgtggtgattcgcggcgtgaccgtgatccgtgcgggcgaaattacctggccggcaccgccgattcaggtatcagctcagccgcaggcggcacaaaaagcggcaccggaagtgaaaactgaggaaaaatgtacctgctcaccgtggcgtaaatacgcgttgatggcgctggcaatcattctttttggctggatggcaagcgttgcgccgaaagaattccttgggcacttcaccgttttcgcgctggcctgcgttgtcggttattacgtggtgtggaatgtatcgcacgcgctgcatacaccgttgatgtcggtcaccaacgcgatttcagggattattgttgtcggagcactgttgcagattggccagggcggctgggttagcttccttagttttatcgcggtgcttatagccagcattaatattttcggtggcttcaccgtgactcagcgcatgctgaaaatgttccgcaaaaattaa

SEQ ID NO: 2 - protein, 510 aa, Escherichia coli
MRIGIPRERLTNETRVAATPKTVEQLLKLGFTVAVESGAGQLASFDDKAFVQAGAEIVEGNSVWQSEIILKVNAPLDDEIALLNPGTTLVSFIWPAQNPELMQKLAERNVTVMAMDSVPRISRAQSLDALSSMANIAGYRAIVEAAHEFGRFFTGQITAAGKVPPAKVMVIGAGVAGLAAIGAANSLGAIVRAFDTRPEVKEQVQSMGAEFLELDFKEEAGSGDGYAKVMSDAFIKAEMELFAAQAKEVDIIVTTALIPGKPAPKLITREMVDSMKAGSVIVDLAAQNGGNCEYTVPGEIFTTENGVKVIGYTDLPGRLPTQSSQLYGTNLVNLLKLLCKEKDGNITVDFDDVVIRGVTVIRAGEITWPAPPIQVSAQPQAAQKAAPEVKTEEKCTCSPWRKYALMALAIILFGWMASVAPKEFLGHFTVFALACVVGYYVVWNVSHALHTPLMSVTNAISGIIVVGALLQIGQGGWVSFLSFIAVLIASINIFGGFTVTQRMLKMFRKN

SEQ ID NO: 3 - DNA, 1389 bp, Escherichia coli
atgtctggaggattagttacagctgcatacattgttgccgcgatcctgtttatcttcagtctggccggtctttcgaaacatgaaacgtctcgccagggtaacaacttcggtatcgccgggatggcgattgcgttaatcgcaaccatttttggaccggatacgggtaatgttggctggatcttgctggcgatggtcattggtggggcaattggtatccgtctggcgaagaaagttgaaatgaccgaaatgccagaactggtggcgatcctgcatagcttcgtgggtctggcggcagtgctggttggctttaacagctatctgcatcatgacgcgggaatggcaccgattctggtcaatattcacctgacggaagtgttcctcggtatcttcatcggggcggtaacgttcacgggttcggtggtggcgttcggcaaactgtgtggcaagatttcgtctaaaccattgatgctgccaaaccgtcacaaaatgaacctggcggctctggtcgtttccttcctgctgctgattgtatttgttcgcacggacagcgtcggcctgcaagtgctggcattgctgataatgaccgcaattgcgctggtattcggctggcatttagtcgcctccatcggtggtgcagatatgccagtggtggtgtcgatgctgaactcgtactccggctgggcggctgcggctgcgggctttatgctcagcaacgacctgctgattgtgaccggtgcgctggtcggttcttcgggggctatcctttcttacattatgtgtaaggcgatgaaccgttcctttatcagcgttattgcgggtggtttcggcaccgacggctcttctactggcgatgatcaggaagtgggtgagcaccgcgaaatcaccgcagaagagacagcggaactgctgaaaaactcccattcagtgatcattactccggggtacggcatggcagtcgcgcaggcgcaatatcctgtcgctgaaattactgagaaattgcgcgctcgtggtattaatgtgcgtttcggtatccacccggtcgcggggcgtttgcctggacatatgaacgtattgctggctgaagcaaaagtaccgtatgacatcgtgctggaaatggacgagatcaatgatgactttgctgataccgataccgtactggtgattggtgctaacgatacggttaacccggcggcgcaggatgatccgaagagtccgattgctggtatgcctgtgctggaagtgtggaaagcgcagaacgtgattgtctttaaacgttcgatgaacactggctatgctggtgtgcaaaacccgctgttcttcaaggaaaacacccacatgctgtttggtgacgccaaagccagcgtggatgcaatcctgaaagctctgtaa

SEQ ID NO: 4 - protein, 462 aa, Escherichia coli
MSGGLVTAAYIVAAILFIFSLAGLSKHETSRQGNNFGIAGMAIALIATIFGPDTGNVGWILLAMVIGGAIGIRLAKKVEMTEMPELVAILHSFVGLAAVLVGFNSYLHHDAGMAPILVNIHLTEVFLGIFIGAVTFTGSVVAFGKLCGKISSKPLMLPNRHKMNLAALVVSFLLLIVFVRTDSVGLQVLALLIMTAIALVFGWHLVASIGGADMPVVVSMLNSYSGWAAAAAGFMLSNDLLIVTGALVGSSGAILSYIMCKAMNRSFISVIAGGFGTDGSSTGDDQEVGEHREITAEETAELLKNSHSVIITPGYGMAVAQAQYPVAEITEKLRARGINVRFGIHPVAGRLPGHMNVLLAEAKVPYDIVLEMDEINDDFADTDTVLVIGANDTVNPAAQDDPKSPIAGMPVLEVWKAQNVIVFKRSMNTGYAGVQNPLFFKENTHMLFGDAKASVDAILKAL

SEQ ID NO: 5 - DNA, 1716 bp, Bacillus subtilis
atgttgacaaaagcaacaaaagaacaaaaatcccttgtgaaaaacagaggggcggagcttgttgttgattgcttagtggagcaaggtgtcacacatgtatttggcattccaggtgcaaaaattgatgcggtatttgacgctttacaagataaaggacctgaaattatcgttgcccggcacgaacaaaacgcagcattcatggcccaagcagtcggccgtttaactggaaaaccgggagtcgtgttagtcacatcaggaccgggtgcctctaacttggcaacaggcctgctgacagcgaacactgaaggagaccctgtcgttgcgcttgctggaaacgtgatccgtgcagatcgtttaaaacggacacatcaatctttggataatgcggcgctattccagccgattacaaaatacagtgtagaagttcaagatgtaaaaaatataccggaagctgttacaaatgcatttaggatagcgtcagcagggcaggctggggccgcttttgtgagctttccgcaagatgttgtgaatgaagtcacaaatacgaaaaacgtgcgtgctgttgcagcgccaaaactcggtcctgcagcagatgatgcaatcagtgcggccatagcaaaaatccaaacagcaaaacttcctgtcgttttggtcggcatgaaaggcggaagaccggaagcaattaaagcggttcgcaagcttttgaaaaaggttcagcttccatttgttgaaacatatcaagctgccggtaccctttctagagatttagaggatcaatattttggccgtatcggtttgttccgcaaccagcctggcgatttactgctagagcaggcagatgttgttctgacgatcggctatgacccgattgaatatgatccgaaattctggaatatcaatggagaccggacaattatccatttagacgagattatcgctgacattgatcatgcttaccagcctgatcttgaattgatcggtgacattccgtccacgatcaatcatatcgaacacgatgctgtgaaagtggaatttgcagagcgtgagcagaaaatcctttctgatttaaaacaatatatgcatgaaggtgagcaggtgcctgcagattggaaatcagacagagcgcaccctcttgaaatcgttaaagagttgcgtaatgcagtcgatgatcatgttacagtaacttgcgatatcggttcgcacgccatttggatgtcacgttatttccgcagctacgagccgttaacattaatgatcagtaacggtatgcaaacactcggcgttgcgcttccttgggcaatcggcgcttcattggtgaaaccgggagaaaaagtggtttctgtctctggtgacggcggtttcttattctcagcaatggaattagagacagcagttcgactaaaagcaccaattgtacacattgtatggaacgacagcacatatgacatggttgcattccagcaattgaaaaaatataaccgtacatctgcggtcgatttcggaaatatcgatatcgtgaaatatgcggaaagcttcggagcaactggcttgcgcgtagaatcaccagaccagctggcagatgttctgcgtcaaggcatgaacgctgaaggtcctgtcatcatcgatgtcccggttgactacagtgataacattaatttagcaagtgacaagcttccgaaagaattcggggaactcatgaaaacgaaagctctctag

SEQ ID NO: 6 - DNA, 1716 bp, Bacillus subtilis
atgttgactaaagctacaaaagagcagaaatcattggtgaaaaataggggtgcagaacttgttgtggactgtttggtagaacagggcgtaacacatgtttttggtatcccaggtgcaaaaatcgacgccgtgtttgatgcattacaagacaagggtccagaaattattgttgctagacatgagcaaaatgccgcatttatggcgcaagctgtaggtaggcttacaggtaaacctggtgttgtcctagttacgtctggcccaggagcctccaatttagcaactggtctattgacagctaatactgagggagatcctgtagttgcgttagccggtaatgtaattagagctgataggcttaagagaactcaccagtctctagacaacgctgctttattccaaccgatcaccaagtactcagtagaggtacaagacgtaaagaatatacctgaagctgtgacaaacgcatttcgtatagcttctgctggtcaggctggtgccgcgtttgtttcttttcctcaagacgttgtcaatgaagtgaccaatactaaaaacgttagagcggttgcagcccctaaactaggtccagccgcagacgacgcaattagcgctgcaattgctaaaattcagacggcgaaactaccagtagtccttgtcggtatgaagggcggaagaccagaagcaataaaagctgttcgtaagttattgaagaaagtccaattacctttcgttgagacttaccaagcagcaggtactttatctagagatttagaggatcagtattttggaaggataggtctatttagaaaccaaccaggagatttactattagaacaagctgatgttgtacttactatcggttatgatcctatagagtatgacccaaagttttggaacataaatggggatagaacaattatacatctagacgagataatcgccgacatcgatcacgcttatcaaccagatttagaactaatcggagatatcccgtcaacaatcaatcatattgaacatgatgctgtaaaggttgagttcgctgaacgtgagcagaaaatcttatctgatctaaagcaatatatgcatgagggtgaacaagttccagcagactggaaatctgaccgtgcacatcctttggaaatcgttaaggaactaagaaatgcggtcgatgatcatgtgactgttacatgtgatatcggttcacatgcaatttggatgtcacgttattttaggagctacgaaccattaactttaatgatatctaacgggatgcaaactctgggggttgcacttccttgggctattggcgctagtttagttaagcccggtgagaaggtggtatcggtatcaggtgatggtggctttctgttttcggctatggaattagaaactgcagtccgtttaaaagctcccattgtgcatattgtctggaatgattctacttacgacatggttgcttttcaacagttgaagaaatacaatagaacttcggctgtagactttggtaacatcgatattgtgaaatatgctgagtcttttggcgcaacaggcctgagggtggaaagtccagatcagttagctgatgtgttgagacaagggatgaatgccgagggaccggtaatcatagatgtgccagttgactactcagacaatattaatttggcttctgataaacttcctaaagagtttggcgagctaatgaagaccaaagccttataa

SEQ ID NO: 7 - protein, 571 aa, Bacillus subtilis
MLTKATKEQKSLVKNRGAELVVDCLVEQGVTHVFGIPGAKIDAVFDALQDKGPEIIVARHEQNAAFMAQAVGRLTGKPGVVLVTSGPGASNLATGLLTANTEGDPVVALAGNVIRADRLKRTHQSLDNAALFQPITKYSVEVQDVKNIPEAVTNAFRIASAGQAGAAFVSFPQDVVNEVTNTKNVRAVAAPKLGPAADDAISAAIAKIQTAKLPVVLVGMKGGRPEAIKAVRKLLKKVQLPFVETYQAAGTLSRDLEDQYFGRIGLFRNQPGDLLLEQADVVLTIGYDPIEYDPKFWNINGDRTIIHLDEIIADIDHAYQPDLELIGDIPSTINHIEHDAVKVEFAEREQKILSDLKQYMHEGEQVPADWKSDRAHPLEIVKELRNAVDDHVTVTCDIGSHAIWMSRYFRSYEPLTLMISNGMQTLGVALPWAIGASLVKPGEKVVSVSGDGGFLFSAMELETAVRLKAPIVHIVWNDSTYDMVAFQQLKKYNRTSAVDFGNIDIVKYAESFGATGLRVESPDQLADVLRQGMNAEGPVIIDVPVDYSDNINLASDKLPKEFGELMKTKAL

SEQ ID NO: 8 - DNA, 1716 bp, Bacillus subtilis
atgttgacaaaagcaacaaaagaacaaaaatcccttgtgaaaagcagaggggcggagcttgttgttgattgcttagcggagcaaggtgtcacacatgtatttggcattccaggtgcaaaaattgatgcggtatttgacgctttacaagataaagggcctgaaattatcgttgcccggcatgaacaaaatgcagcatttatggcgcaagcagtcggccgtttaactggaaaaccgggagtcgtgttagtcacatcaggaccaggtgcttcgaacttggcaacaggactgctgacagcaaacactgaaggtgaccctgtcgttgcgcttgctgggaacgtgatccgtgcagatcgtttaaaacggacacatcaatctttggataatgcggcgctattccagccgattacaaaatacagtgtagaagttcaagatgtaaaaaatataccggaagctgttacaaatgcgtttaggatagcgtcagcagggcaggctggggccgcttttgtgagttttccgcaagatgttgtgaatgaagtcacaaatacaaaaaacgtacgtgctgtcgcagcgccaaaacttggtcccgcagcagatgacgcaatcagtatggccattgcaaaaattcaaacagcaaaacttcctgtcgttttagtcggcatgaagggcggaagaccggaagcgattaaagcggttcgcaagctattgaaaaaagtgcagcttccattcgttgaaacatatcaagctgccggtactcttacgagagatttagaggatcagtattttggccggatcggtttattccgcaaccagcctggcgatctgctgcttgagcaggctgatgttgttctgacaatcggctatgacccaattgaatatgatccgaaattctggaatgtcaatggagaccggacgatcatccatttagacgagattctggctgacattgatcatgcttaccagccggatcttgaactgatcggtgatattccatctacgatcaatcatatcgaacacgatgctgtgaaagtagactttgcggaacgtgagcagaagatcctttctgatttaaaacaatatatgcatgagggtgagcaggtgcctgcagattggaaatcagacagagtgcatcctcttgaaatcgttaaagaattgcgaaacgcagtcgatgatcatgttacagtgacttgcgatatcggttcacacgcgatttggatgtcacgttatttccgcagctacgagccgttaacattaatgattagtaacggtatgcaaacactcggcgttgcgcttccttgggcaatcggcgcttcattggtgaaaccgggagaaaaagtagtatcagtctccggtgatggcggtttcttattctcagctatggaattagagacagcagttcgtttaaaagcaccaattgtacacattgtatggaacgacagcacatatgacatggttgcattccagcaattgaaaaaatataatcgtacatctgcggtcgatttcggaaatatcgatatcgtgaaatacgcggaaagcttcggagcaactggcttacgcgtagaatcaccagaccagctggcagatgttctgcgtcaaggcatgaacgctgaggggcctgtcatcattgatgtcccggttgactacagtgataacgttaatttagcaagtgacaagcttccgaaagaattcggggaactcatgaaaacgaaagctctctag

SEQ ID NO: 9 - protein, 571 aa, Bacillus subtilis
MLTKATKEQKSLVKSRGAELVVDCLAEQGVTHVFGIPGAKIDAVFDALQDKGPEIIVARHEQNAAFMAQAVGRLTGKPGVVLVTSGPGASNLATGLLTANTEGDPVVALAGNVIRADRLKRTHQSLDNAALFQPITKYSVEVQDVKNIPEAVTNAFRIASAGQAGAAFVSFPQDVVNEVTNTKNVRAVAAPKLGPAADDAISMAIAKIQTAKLPVVLVGMKGGRPEAIKAVRKLLKKVQLPFVETYQAAGTLTRDLEDQYFGRIGLFRNQPGDLLLEQADVVLTIGYDPIEYDPKFWNVNGDRTIIHLDEILADIDHAYQPDLELIGDIPSTINHIEHDAVKVDFAEREQKILSDLKQYMHEGEQVPADWKSDRVHPLEIVKELRNAVDDHVTVTCDIGSHAIWMSRYFRSYEPLTLMISNGMQTLGVALPWAIGASLVKPGEKVVSVSGDGGFLFSAMELETAVRLKAPIVHIVWNDSTYDMVAFQQLKKYNRTSAVDFGNIDIVKYAESFGATGLRVESPDQLADVLRQGMNAEGPVIIDVPVDYSDNVNLASDKLPKEFGELMKTKAL

SEQ ID NO: 10 - DNA, 1476 bp, Escherichia coli
atggctaactacttcaatacactgaatctgcgccagcagctggcacagctgggcaaatgtcgctttatgggccgcgatgaattcgccgatggcgcgagctaccttcagggtaaaaaagtagtcatcgtcggctgtggcgcacagggtctgaaccagggcctgaacatgcgtgattctggtctcgatatctcctacgctctgcgtaaagaagcgattgccgagaagcgcgcgtcctggcgtaaagcgaccgaaaatggttttaaagtgggtacttacgaagaactgatcccacaggcggatctggtgattaacctgacgccggacaagcagcactctgatgtagtgcgcaccgtacagccactgatgaaagacggcgcggcgctgggctactcgcacggtttcaacatcgtcgaagtgggcgagcagatccgtaaagatatcaccgtagtgatggttgcgccgaaatgcccaggcaccgaagtgcgtgaagagtacaaacgtgggttcggcgtaccgacgctgattgccgttcacccggaaaacgatccgaaaggcgaaggcatggcgattgccaaagcctgggcggctgcaaccggtggtcaccgtgcgggtgtgctggaatcgtccttcgttgcggaagtgaaatctgacctgatgggcgagcaaaccatcctgtgcggtatgttgcaggctggctctctgctgtgcttcgacaagctggtggaagaaggtaccgatccagcatacgcagaaaaactgattcagttcggttgggaaaccatcaccgaagcactgaaacagggcggcatcaccctgatgatggaccgtctctctaacccggcgaaactgcgtgcttatgcgctttctgaacagctgaaagagatcatggcacccctgttccagaaacatatggacgacatcatctccggcgaattctcttccggtatgatggcggactgggccaacgatgataagaaactgctgacctggcgtgaagagaccggcaaaaccgcgtttgaaaccgcgccgcagtatgaaggcaaaatcggcgagcaggagtacttcgataaaggcgtactgatgattgcgatggtgaaagcgggcgttgaactggcgttcgaaaccatggtcgattccggcatcattgaagagtctgcatattatgaatcactgcacgagctgccgctgattgccaacaccatcgcccgtaagcgtctgtacgaaatgaacgtggttatctctgataccgctgagtacggtaactatctgttctcttacgcttgtgtgccgttgctgaaaccgtttatggcagagctgcaaccgggcgacctgggtaaagctattccggaaggcgcggtagataacgggcaactgcgtgatgtgaacgaagcgattcgcagccatgcgattgagcaggtaggtaagaaactgcgcggctatatgacagatatgaaacgtattgctgttgcgggttaa

SEQ ID NO: 11 - DNA, 1476 bp, Escherichia coli
atggcgaattatttcaacactctgaacctgcgtcaacaactggcgcaactgggtaagtgccgtttcatgggtcgtgacgagtttgcggacggtgcttcttatctgcaaggcaagaaggttgttattgttggttgcggtgcgcaaggcctgaatcaaggtctgaatatgcgcgacagcggcctggacattagctatgcgctgcgcaaggaggctatcgcggaaaaacgtgctagctggcgcaaggctactgagaacggcttcaaggttggcacctatgaggagctgattccgcaagctgacctggttatcaatctgaccccagataaacaacatagcgacgttgttcgtactgttcaaccgctgatgaaggatggtgctgctctgggttatagccacggctttaacattgttgaggtaggtgaacaaattcgcaaggacattactgttgttatggtggctccaaagtgtccgggtactgaggttcgcgaggaatataagcgcggttttggtgttccaaccctgatcgcggtgcatccagagaatgacccaaagggtgagggtatggctatcgcgaaggcgtgggctgcggcgactggcggccatcgcgctggcgttctggagagcagctttgtggctgaggttaagagcgatctgatgggtgaacagactattctgtgtggtatgctgcaagcgggtagcctgctgtgttttgataaactggttgaggagggcactgacccggcgtatgcggagaagctgatccaatttggctgggagactattactgaggcgctgaagcaaggtggtattactctgatgatggatcgcctgagcaatccagctaagctgcgcgcgtacgctctgagcgagcaactgaaggaaattatggcaccgctgtttcaaaagcacatggatgatatcattagcggtgagtttagcagcggcatgatggctgattgggcgaatgacgacaaaaagctgctgacttggcgcgaggaaactggtaagactgctttcgagactgctccacaatacgagggtaagattggtgaacaagaatattttgacaagggtgttctgatgatcgctatggttaaggctggtgtggagctggcttttgagactatggttgacagcggtattatcgaggaaagcgcgtactacgagagcctgcatgaactgccactgatcgcgaatactattgcgcgcaaacgcctgtatgagatgaatgttgtgattagcgacactgcggaatatggcaattacctgtttagctatgcgtgcgttccactgctgaagccattcatggcggaactgcagccaggtgatctgggcaaggcgatcccagagggtgctgttgacaatggtcagctgcgcgacgttaatgaggctatccgttctcacgctatcgaacaagttggcaaaaagctgcgtggttacatgaccgacatgaagcgcatcgcggtggctggctaa

SEQ ID NO: 12 - DNA, 1476 bp, Escherichia coli
atggccaactattttaacacattaaatttgagacaacaattggctcaactgggtaagtgcagatttatgggaagggacgagtttgctgatggtgcttcttatctgcaaggaaagaaagtagtaattgttggctgcggtgctcagggtctaaaccaaggtttaaacatgagagattcaggtctggatatttcgtatgcattgaggaaagaggcaattgcagaaaagagggcctcctggcgtaaagcgacggaaaatgggttcaaagttggtacttacgaagaactgatccctcaggcagatttagtgattaacctaacaccagataagcaacactcagacgtagtaagaacagttcaaccgctgatgaaggatggggcagctttaggttactctcatggctttaatatcgttgaagtgggcgagcagatcagaaaagatataacagtcgtaatggttgcaccaaagtgcccaggtacggaagtcagagaggagtacaagaggggttttggtgtacctacattgatcgccgtacatcctgaaaatgaccccaaaggtgaaggtatggcaattgcgaaggcatgggcagccgcaaccggaggtcatagagcgggtgtgttagagagttctttcgtagctgaggtcaagagtgacttaatgggtgaacaaaccattctgtgcggaatgttgcaggcagggtctttactatgctttgataaattggtcgaagagggtacagatcctgcctatgctgaaaagttgatacaatttggttgggagacaatcaccgaggcacttaaacaaggtggcataacattgatgatggatagactttcaaatccggccaagctaagagcctacgccttatctgagcaactaaaagagatcatggcaccattattccaaaagcacatggacgatattatctccggtgagttttcctcaggaatgatggcagattgggcaaacgatgataaaaagttattgacgtggagagaagaaaccggcaagacggcattcgagacagccccacaatacgaaggtaaaattggtgaacaagaatactttgataagggagtattgatgatagctatggtgaaggcaggggtagaacttgcattcgaaactatggttgactccggtatcattgaagaatctgcatactatgagtctttgcatgaattgcctttgatagcaaatactattgcaagaaaaagactttacgagatgaatgttgtcatatcagacactgcagaatatggtaattacttatttagctacgcatgtgtcccgttgttaaagcccttcatggccgagttacaacctggtgatttggggaaggctattccggaaggagcggttgacaatggccaactgagagacgtaaatgaagctattcgttcacatgctatagaacaggtgggtaaaaagctgagaggatatatgaccgatatgaaaagaattgcagtggcaggatga

SEQ ID NO: 13 - protein, 491 aa, Escherichia coli
MANYFNTLNLRQQLAQLGKCRFMGRDEFADGASYLQGKKVVIVGCGAQGLNQGLNMRDSGLDISYALRKEAIAEKRASWRKATENGFKVGTYEELIPQADLVINLTPDKQHSDVVRTVQPLMKDGAALGYSHGFNIVEVGEQIRKDITVVMVAPKCPGTEVREEYKRGFGVPTLIAVHPENDPKGEGMAIAKAWAAATGGHRAGVLESSFVAEVKSDLMGEQTILCGMLQAGSLLCFDKLVEEGTDPAYAEKLIQFGWETITEALKQGGITLMMDRLSNPAKLRAYALSEQLKEIMAPLFQKHMDDIISGEFSSGMMADWANDDKKLLTWREETGKTAFETAPQYEGKIGEQEYFDKGVLMIAMVKAGVELAFETMVDSGIIEESAYYESLHELPLIANTIARKRLYEMNVVISDTAEYGNYLFSYACVPLLKPFMAELQPGDLGKAIPEGAVDNGQLRDVNEAIRSHAIEQVGKKLRGYMTDMKRIAVAG

SEQ ID NO: 14 - DNA, 1500 bp, Escherichia coli
atggcgaattatttcaacactctgaacctgcgtcaacaactggcgcaactgggtaagtgccgtttcatgggtcgtgacgagtttgcggacggtgcttcttatctgcaaggcaagaaggttgttattgttggttgcggtgcgcaaggcctgaatcaaggtctgaatatgcgcgacagcggcctggacattagctatgcgctgcgcaaggaggctatcgcggaaaaacgtgctagctggcgcaaggctactgagaacggcttcaaggttggcacctatgaggagctgattccgcaagctgacctggttatcaatctgaccccagataaacaacatagcgacgttgttcgtactgttcaaccgctgatgaaggatggtgctgctctgggttatagccacggctttaacattgttgaggtaggtgaacaaattcgcaaggacattactgttgttatggtggctccaaagtgtccgggtactgaggttcgcgaggaatataagcgcggttttggtgttccaaccctgatcgcggtgcatccagagaatgacccaaagggtgagggtatggctatcgcgaaggcgtgggctgcggcgactggcggccatcgcgctggcgttctggagagcagctttgtggctgaggttaagagcgatctgatgggtgaacagactattctgtgtggtatgctgcaagcgggtagcctgctgtgttttgataaactggttgaggagggcactgacccggcgtatgcggagaagctgatccaatttggctgggagactattactgaggcgctgaagcaaggtggtattactctgatgatggatcgcctgagcaatccagctaagctgcgcgcgtacgctctgagcgagcaactgaaggaaattatggcaccgctgtttcaaaagcacatggatgatatcattagcggtgagtttagcagcggcatgatggctgattgggcgaatgacgacaaaaagctgctgacttggcgcgaggaaactggtaagactgctttcgagactgctccacaatacgagggtaagattggtgaacaagaatattttgacaagggtgttctgatgatcgctatggttaaggctggtgtggagctggcttttgagactatggttgacagcggtattatcgaggaaagcgcgtactacgagagcctgcatgaactgccactgatcgcgaatactattgcgcgcaaacgcctgtatgagatgaatgttgtgattagcgacactgcggaatatggcaattacctgtttagctatgcgtgcgttccactgctgaagccattcatggcggaactgcagccaggtgatctgggcaaggcgatcccagagggtgctgttgacaatggtcagctgcgcgacgttaatgaggctatccgttctcacgctatcgaacaagttggcaaaaagctgcgtggttacatgaccgacatgaagcgcatcgcggtggctggcctcgagcaccaccaccaccaccactga

SEQ ID NO: 15 - protein, 499 aa, Escherichia coli
MANYFNTLNLRQQLAQLGKCRFMGRDEFADGASYLQGKKVVIVGCGAQGLNQGLNMRDSGLDISYALRKEAIAEKRASWRKATENGFKVGTYEELIPQADLVINLTPDKQHSDVVRTVQPLMKDGAALGYSHGFNIVEVGEQIRKDITVVMVAPKCPGTEVREEYKRGFGVPTLIAVHPENDPKGEGMAIAKAWAAATGGHRAGVLESSFVAEVKSDLMGEQTILCGMLQAGSLLCFDKLVEEGTDPAYAEKLIQFGWETITEALKQGGITLMMDRLSNPAKLRAYALSEQLKEIMAPLFQKHMDDIISGEFSSGMMADWANDDKKLLTWREETGKTAFETAPQYEGKIGEQEYFDKGVLMIAMVKAGVELAFETMVDSGIIEESAYYESLHELPLIANTIARKRLYEMNVVISDTAEYGNYLFSYACVPLLKPFMAELQPGDLGKAIPEGAVDNGQLRDVNEAIRSHAIEQVGKKLRGYMTDMKRIAVAGLEHHHHHH

SEQ ID NO: 16 - DNA, 1494 bp, Escherichia coli
atggcgaattatttcaacactctgaacctgcgtcaacaactggcgcaactgggtaagtgccgtttcatgggtcgtgacgagtttgcggacggtgcttcttatctgcaaggcaagaaggttgttattgttggttgcggtgcgcaaggcctgaatcaaggtctgaatatgcgcgacagcggcctggacattagctatgcgctgcgcaaggaggctatcgcggaaaaacgtgctgactggcgcaaggctactgagaacggcttcaaggttggcacctatgaggagctgattccgcaagctgacctggttatcaatctgaccccagataaacaacatagcgacgttgttcgtactgttcaaccgctgatgaaggatggtgctgctctgggttatagccacggctttaacattgttgaggtaggtgaacaaattcgcaaggacattactgttgttatggtggctccaaagtgtccgggtactgaggttcgcgaggaatataagcgcggttttggtgttccaaccctgatcgcggtgcatccagagaatgacccaaagggtgagggtatggctatcgcgaaggcgtgggctgcggcgactggcggccatcgcgctggcgttctggagagcagctttgtggctgaggttaagagcgatctgatgggtgaacagactattctgtgtggtatgctgcaagcgggtagcctgctgtgttttgataaactggttgaggagggcactgacccggcgtatgcggagaagctgatccaatttggctgggagactattactgaggcgctgaagcaaggtggtattactctgatgatggatcgcctgagcaatccagctaagctgcgcgcgtacgctctgagcgagcaactgaaggaaattatggcaccgctgtttcaaaagcacatggatgatatcattagcggtgagtttagcagcggcatgatggctgattgggcgaatgacgacaaaaagctgctgacttggcgcgaggaaactggtaagactgctttcgagactgctccacaatacgagggtaagattggtgaacaagaatattttgacaagggtgttctgatgatcgctatggttaaggctggtgtggagctggcttttgagactatggttgacagcggtattatcgaggaaagcgcgtactacgagagcctgcatgaactgccactgatcgcgaatactattgcgcgcaaacgcctgtatgagatgaatgttgtgattagcgacactgcggaatatggcaattacctgtttagctatgcgtgcgttccactgctgaagccattcatggcggaactgcagccaggtgatctgggcaaggcgatcccagagggtgctgttgacaatggtcagctgcgcgacgttaatgaggctatccgttctcacgctatcgaacaagttggcaaaaagctgcgtggttacatgaccgacatgaagcgcatcgcggtggctggccaccaccaccaccaccactaa

SEQ ID NO: 17 - protein, 499 aa, Escherichia coli
MANYFNTLNLRQQLAQLGKCRFMGRDEFADGASYLQGKKVVIVGCGAQGLNQGLNMRDSGLDISYALRKEAIAEKRADWRKATENGFKVGTYEELIPQADLVINLTPDKQHSDVVRTVQPLMKDGAALGYSHGFNIVEVGEQIRKDITVVMVAPKCPGTEVREEYKRGFGVPTLIAVHPENDPKGEGMAIAKAWAAATGGHRAGVLESSFVAEVKSDLMGEQTILCGMLQAGSLLCFDKLVEEGTDPAYAEKLIQFGWETITEALKQGGITLMMDRLSNPAKLRAYALSEQLKEIMAPLFQKHMDDIISGEFSSGMMADWANDDKKLLTWREETGKTAFETAPQYEGKIGEQEYFDKGVLMIAMVKAGVELAFETMVDSGIIEESAYYESLHELPLIANTIARKRLYEMNVVISDTAEYGNYLFSYACVPLLKPFMAELQPGDLGKAIPEGAVDNGQLRDVNEAIRSHAIEQVGKKLRGYMTDMKRIAVAGLEHHHHHH

SEQ ID NO: 18 - DNA, 1476 bp, Escherichia coli
atggcgaattatttcaacactctgaacctgcgtcaacaactggcgcaactgggtaagtgccgtttcatgggtcgtgacgagtttgcggacggtgcttcttatctgcaaggcaagaaggttgttattgttggttgcggtgcgcaaggcctgaatcaaggtctgaatatgcgcgacagcggcctggacattagctatgcgctgcgcaaggaggctatcgcggaaaaacgtgctgactggcgcaaggctactgagaacggcttcaaggttggcacctatgaggagctgattccgcaagctgacctggttatcaatctgaccccagataaacaacatagcgacgttgttcgtactgttcaaccgctgatgaaggatggtgctgctctgggttatagccacggctttaacattgttgaggtaggtgaacaaattcgcaaggacattactgttgttatggtggctccaaagtgtccgggtactgaggttcgcgaggaatataagcgcggttttggtgttccaaccctgatcgcggtgcatccagagaatgacccaaagggtgagggtatggctatcgcgaaggcgtgggctgcggcgactggcggccatcgcgctggcgttctggagagcagctttgtggctgaggttaagagcgatctgatgggtgaacagactattctgtgtggtatgctgcaagcgggtagcctgctgtgttttgataaactggttgaggagggcactgacccggcgtatgcggagaagctgatccaatttggctgggagactattactgaggcgctgaagcaaggtggtattactctgatgatggatcgcctgagcaatccagctaagctgcgcgcgtacgctctgagcgagcaactgaaggaaattatggcaccgctgtttcaaaagcacatggatgatatcattagcggtgagtttagcagcggcatgatggctgattgggcgaatgacgacaaaaagctgctgacttggcgcgaggaaactggtaagactgctttcgagactgctccacaatacgagggtaagattggtgaacaagaatattttgacaagggtgttctgatgatcgctatggttaaggctggtgtggagctggcttttgagactatggttgacagcggtattatcgaggaaagcgcgtactacgagagcctgcatgaactgccactgatcgcgaatactattgcgcgcaaacgcctgtatgagatgaatgttgtgattagcgacactgcggaatatggcaattacctgtttagctatgcgtgcgttccactgctgaagccattcatggcggaactgcagccaggtgatctgggcaaggcgatcccagagggtgctgttgacaatggtcagctgcgcgacgttaatgaggctatccgttctcacgctatcgaacaagttggcaaaaagctgcgtggttacatgaccgacatgaagcgcatcgcggtggctggctaa

SEQ ID NO: 19 - protein, 493 aa, Escherichia coli
MANYFNTLNLRQQLAQLGKCRFMGRDEFADGASYLQGKKVVIVGCGAQGLNQGLNMRDSGLDISYALRKEAIAEKRADWRKATENGFKVGTYEELIPQADLVINLTPDKQHSDVVRTVQPLMKDGAALGYSHGFNIVEVGEQIRKDITVVMVAPKCPGTEVREEYKRGFGVPTLIAVHPENDPKGEGMAIAKAWAAATGGHRAGVLESSFVAEVKSDLMGEQTILCGMLQAGSLLCFDKLVEEGTDPAYAEKLIQFGWETITEALKQGGITLMMDRLSNPAKLRAYALSEQLKEIMAPLFQKHMDDIISGEFSSGMMADWANDDKKLLTWREETGKTAFETAPQYEGKIGEQEYFDKGVLMIAMVKAGVELAFETMVDSGIIEESAYYESLHELPLIANTIARKRLYEMNVVISDTAEYGNYLFSYACVPLLKPFMAELQPGDLGKAIPEGAVDNGQLRDVNEAIRSHAIEQVGKKLRGYMTDMKRIAVAGLE

SEQ ID NO: 20 - DNA, 1476 bp, Escherichia coli
atggcgaattatttcaacactctgaacctgcgtcaacaactggcgcaactgggtaagtgccgtttcatgggtcgtgacgagtttgcggacggtgcttcttatctgcaaggcaagaaggttgttattgttggttgcggtgcgcaaggcctgaatcaaggtctgaatatgcgcgacagcggcctggacattagctatgcgctgcgcaaggaggctatcgcggaaaaacgtgctagctggcgcaaggctactgagaacggcttcaaggttggcacctatgaggagctgattccgcaagctgacctggttatcaatctgaccccagataaagcacatagcgacgttgttcgtactgttcaaccgctgatgaaggatggtgctgctctgggttatagccacggctttaacattgttgaggtaggtgaacaaattcgcaaggacattactgttgttatggtggctccaaagtgtccgggtactgaggttcgcgaggaatataagcgcggttttggtgttccaaccctgatcgcggtgcatccagagaatgacccaaagggtgagggtatggctatcgcgaaggcgtgggctgcggcgactggcggccatcgcgctggcgttctggagagcagctttgtggctgaggttaagagcgatctgatgggtgaacagactattctgtgtggtatgctgcaagcgggtagcctgctgtgttttgataaactggttgaggagggcactgacccggcgtatgcggagaagctgatccaatttggctgggagactattactgaggcgctgaagcaaggtggtattactctgatgatggatcgcctgagcaatccagctaagctgcgcgcgtacgctctgagcgagcaactgaaggaaattatggcaccgctgtttcaaaagcacatggatgatatcattagcggtgagtttagcagcggcatgatggctgattgggcgaatgacgacaaaaagctgctgacttggcgcgaggaaactggtaagactgctttcgagactgctccacaatacgagggtaagattggtgaacaagaatattttgacaagggtgttctgatgatcgctatggttaaggctggtgtggagctggcttttgagactatggttgacagcggtattatcgaggaaagcgcgtactacgagagcctgcatgaactgccactgatcgcgaatactattgcgcgcaaacgcctgtatgagatgaatgttgtgattagcgacactgcggaatatggcaattacctgtttagctatgcgtgcgttccactgctgaagccattcatggcggaactgcagccaggtgatctgggcaaggcgatcccagagggtgctgttgacaatggtcagctgcgcgacgttaatgaggctatccgttctcacgctatcgaacaagttggcaaaaagctgcgtggttacatgaccgacatgaagcgcatcgcggtggctggctaa

SEQ ID NO: 21 - protein, 498 aa, Escherichia coli
MANYFNTLNLRQQLAQLGKCRFMGRDEFADGASYLQGKKVVIVGCGAQGLNQGLNMRDSGLDISYALRKEAIAEKRASWRKATENGFKVGTYEELIPQADLVINLTPDKAHSDVVRTVQPLMKDGAALGYSHGFNIVEVGEQIRKDITVVMVAPKCPGTEVREEYKRGFGVPTLIAVHPENDPKGEGMAIAKAWAAATGGHRAGVLESSFVAEVKSDLMGEQTILCGMLQAGSLLCFDKLVEEGTDPAYAEKLIQFGWETITEALKQGGITLMMDRLSNPAKLRAYALSEQLKEIMAPLFQKHMDDIISGEFSSGMMADWANDDKKLLTWREETGKTAFETAPQYEGKIGEQEYFDKGVLMIAMVKAGVELAFETMVDSGIIEESAYYESLHELPLIANTIARKRLYEMNVVISDTAEYGNYLFSYACVPLLKPFMAELQPGDLGKAIPEGAVDNGQLRDVNEAIRSHAIEQVGKKLRGYMTDMKRIAVAGLEHHHHH

SEQ ID NO: 22 - DNA, 1500 bp, Escherichia coli
atggcgaattatttcaacactctgaacctgcgtcaacaactggcgcaactgggtaagtgccgtttcatgggtcgtgacgagtttgcggacggtgcttcttatctgcaaggcaagaaggttgttattgttggttgcggtgcgcaaggcctgaatcaaggtctgaatatgcgcgacagcggcctggacattagctatgcgctgcgcaaggaggctatcgcggaaaaacgtgctagctggcgcaaggctactgagaacggcttcaaggttggcacctatgaggagctgattccgcaagctgacctggttatcaatctgaccccagataaagtgcatagcgacgttgttcgtactgttcaaccgctgatgaaggatggtgctgctctgggttatagccacggctttaacattgttgaggtaggtgaacaaattcgcaaggacattactgttgttatggtggctccaaagtgtccgggtactgaggttcgcgaggaatataagcgcggttttggtgttccaaccctgatcgcggtgcatccagagaatgacccaaagggtgagggtatggctatcgcgaaggcgtgggctgcggcgactggcggccatcgcgctggcgttctggagagcagctttgtggctgaggttaagagcgatctgatgggtgaacagactattctgtgtggtatgctgcaagcgggtagcctgctgtgttttgataaactggttgaggagggcactgacccggcgtatgcggagaagctgatccaatttggctgggagactattactgaggcgctgaagcaaggtggtattactctgatgatggatcgcctgagcaatccagctaagctgcgcgcgtacgctctgagcgagcaactgaaggaaattatggcaccgctgtttcaaaagcacatggatgatatcattagcggtgagtttagcagcggcatgatggctgattgggcgaatgacgacaaaaagctgctgacttggcgcgaggaaactggtaagactgctttcgagactgctccacaatacgagggtaagattggtgaacaagaatattttgacaagggtgttctgatgatcgctatggttaaggctggtgtggagctggcttttgagactatggttgacagcggtattatcgaggaaagcgcgtactacgagagcctgcatgaactgccactgatcgcgaatactattgcgcgcaaacgcctgtatgagatgaatgttgtgattagcgacactgcggaatatggcaattacctgtttagctatgcgtgcgttccactgctgaagccattcatggcggaactgcagccaggtgatctgggcaaggcgatcccagagggtgctgttgacaatggtcagctgcgcgacgttaatgaggctatccgttctcacgctatcgaacaagttggcaaaaagctgcgtggttacatgaccgacatgaagcgcatcgcggtggctggcctcgagcaccaccaccaccaccactaa

SEQ ID NO: 23 - protein, 499 aa, Escherichia coli
MANYFNTLNLRQQLAQLGKCRFMGRDEFADGASYLQGKKVVIVGCGAQGLNQGLNMRDSGLDISYALRKEAIAEKRASWRKATENGFKVGTYEELIPQADLVINLTPDKVHSDVVRTVQPLMKDGAALGYSHGFNIVEVGEQIRKDITVVMVAPKCPGTEVREEYKRGFGVPTLIAVHPENDPKGEGMAIAKAWAAATGGHRAGVLESSFVAEVKSDLMGEQTILCGMLQAGSLLCFDKLVEEGTDPAYAEKLIQFGWETITEALKQGGITLMMDRLSNPAKLRAYALSEQLKEIMAPLFQKHMDDIISGEFSSGMMADWANDDKKLLTWREETGKTAFETAPQYEGKIGEQEYFDKGVLMIAMVKAGVELAFETMVDSGIIEESAYYESLHELPLIANTIARKRLYEMNVVISDTAEYGNYLFSYACVPLLKPFMAELQPGDLGKAIPEGAVDNGQLRDVNEAIRSHAIEQVGKKLRGYMTDMKRIAVAGLEHHHHHH

SEQ ID NO: 24 - DNA, 1476 bp, Escherichia coli
atggcgaattatttcaacactctgaacctgcgtcaacaactggcgcaactgggtaagtgccgtttcatgggtcgtgacgagtttgcggacggtgcttcttatctgcaaggcaagaaggttgttattgttggttgcggtgcgcaaggcctgaatcaaggtctgaatatgcgcgacagcggcctggacattagctatgcgctgcgcaaggaggctatcgcggaaaaacgtgctagctggcgcaaggctactgagaacggcttcaaggttggcacctatgaggagctgattccgcaagctgacctggttatcaatctgaccccagataaagtgcatagcgacgttgttcgtactgttcaaccgctgatgaaggatggtgctgctctgggttatagccacggctttaacattgttgaggtaggtgaacaaattcgcaaggacattactgttgttatggtggctccaaagtgtccgggtactgaggttcgcgaggaatataagcgcggttttggtgttccaaccctgatcgcggtgcatccagagaatgacccaaagggtgagggtatggctatcgcgaaggcgtgggctgcggcgactggcggccatcgcgctggcgttctggagagcagctttgtggctgaggttaagagcgatctgatgggtgaacagactattctgtgtggtatgctgcaagcgggtagcctgctgtgttttgataaactggttgaggagggcactgacccggcgtatgcggagaagctgatccaatttggctgggagactattactgaggcgctgaagcaaggtggtattactctgatgatggatcgcctgagcaatccagctaagctgcgcgcgtacgctctgagcgagcaactgaaggaaattatggcaccgctgtttcaaaagcacatggatgatatcattagcggtgagtttagcagcggcatgatggctgattgggcgaatgacgacaaaaagctgctgacttggcgcgaggaaactggtaagactgctttcgagactgctccacaatacgagggtaagattggtgaacaagaatattttgacaagggtgttctgatgatcgctatggttaaggctggtgtggagctggcttttgagactatggttgacagcggtattatcgaggaaagcgcgtactacgagagcctgcatgaactgccactgatcgcgaatactattgcgcgcaaacgcctgtatgagatgaatgttgtgattagcgacactgcggaatatggcaattacctgtttagctatgcgtgcgttccactgctgaagccattcatggcggaactgcagccaggtgatctgggcaaggcgatcccagagggtgctgttgacaatggtcagctgcgcgacgttaatgaggctatccgttctcacgctatcgaacaagttggcaaaaagctgcgtggttacatgaccgacatgaagcgcatcgcggtggctggctaa

SEQ ID NO: 25 - protein, 493 aa, Escherichia coli
MANYFNTLNLRQQLAQLGKCRFMGRDEFADGASYLQGKKVVIVGCGAQGLNQGLNMRDSGLDISYALRKEAIAEKRASWRKATENGFKVGTYEELIPQADLVINLTPDKVHSDVVRTVQPLMKDGAALGYSHGFNIVEVGEQIRKDITVVMVAPKCPGTEVREEYKRGFGVPTLIAVHPENDPKGEGMAIAKAWAAATGGHRAGVLESSFVAEVKSDLMGEQTILCGMLQAGSLLCFDKLVEEGTDPAYAEKLIQFGWETITEALKQGGITLMMDRLSNPAKLRAYALSEQLKEIMAPLFQKHMDDIISGEFSSGMMADWANDDKKLLTWREETGKTAFETAPQYEGKIGEQEYFDKGVLMIAMVKAGVELAFETMVDSGIIEESAYYESLHELPLIANTIARKRLYEMNVVISDTAEYGNYLFSYACVPLLKPFMAELQPGDLGKAIPEGAVDNGQLRDVNEAIRSHAIEQVGKKLRGYMTDMKRIAVAGLE

SEQ ID NO: 26 - DNA, 1494 bp, Escherichia coli
atggcgaattatttcaacactctgaacctgcgtcaacaactggcgcaactgggtaagtgccgtttcatgggtcgtgacgagtttgcggacggtgcttcttatctgcaaggcaagaaggttgttattgttggttgcggtgcgcaaggcctgaatcaaggtctgaatatgcgcgacagcggcctggacattagctatgcgctgcgcaaggaggctatcgcggaaaaacgtgctgactggcgcaaggctactgagaacggcttcaaggttggcacctatgaggagctgattccgcaagctgacctggttatcaatctgaccccagataaagtgcatagcgacgttgttcgtactgttcaaccgctgatgaaggatggtgctgctctgggttatagccacggctttaacattgttgaggtaggtgaacaaattcgcaaggacattactgttgttatggtggctccaaagtgtccgggtactgaggttcgcgaggaatataagcgcggttttggtgttccaaccctgatcgcggtgcatccagagaatgacccaaagggtgagggtatggctatcgcgaaggcgtgggctgcggcgactggcggccatcgcgctggcgttctggagagcagctttgtggctgaggttaagagcgatctgatgggtgaacagactattctgtgtggtatgctgcaagcgggtagcctgctgtgttttgataaactggttgaggagggcactgacccggcgtatgcggagaagctgatccaatttggctgggagactattactgaggcgctgaagcaaggtggtattactctgatgatggatcgcctgagcaatccagctaagctgcgcgcgtacgctctgagcgagcaactgaaggaaattatggcaccgctgtttcaaaagcacatggatgatatcattagcggtgagtttagcagcggcatgatggctgattgggcgaatgacgacaaaaagctgctgacttggcgcgaggaaactggtaagactgctttcgagactgctccacaatacgagggtaagattggtgaacaagaatattttgacaagggtgttctgatgatcgctatggttaaggctggtgtggagctggcttttgagactatggttgacagcggtattatcgaggaaagcgcgtactacgagagcctgcatgaactgccactgatcgcgaatactattgcgcgcaaacgcctgtatgagatgaatgttgtgattagcgacactgcggaatatggcaattacctgtttagctatgcgtgcgttccactgctgaagccattcatggcggaactgcagccaggtgatctgggcaaggcgatcccagagggtgctgttgacaatggtcagctgcgcgacgttaatgaggctatccgttctcacgctatcgaacaagttggcaaaaagctgcgtggttacatgaccgacatgaagcgcatcgcggtggctggccaccaccaccaccaccactaa

SEQ ID NO: 27 - protein, 499 aa, Escherichia coli
MANYFNTLNLRQQLAQLGKCRFMGRDEFADGASYLQGKKVVIVGCGAQGLNQGLNMRDSGLDISYALRKEAIAEKRADWRKATENGFKVGTYEELIPQADLVINLTPDKVHSDVVRTVQPLMKDGAALGYSHGFNIVEVGEQIRKDITVVMVAPKCPGTEVREEYKRGFGVPTLIAVHPENDPKGEGMAIAKAWAAATGGHRAGVLESSFVAEVKSDLMGEQTILCGMLQAGSLLCFDKLVEEGTDPAYAEKLIQFGWETITEALKQGGITLMMDRLSNPAKLRAYALSEQLKEIMAPLFQKHMDDIISGEFSSGMMADWANDDKKLLTWREETGKTAFETAPQYEGKIGEQEYFDKGVLMIAMVKAGVELAFETMVDSGIIEESAYYESLHELPLIANTIARKRLYEMNVVISDTAEYGNYLFSYACVPLLKPFMAELQPGDLGKAIPEGAVDNGQLRDVNEAIRSHAIEQVGKKLRGYMTDMKRIAVAGLEHHHHHH

SEQ ID NO: 28 - DNA, 1494 bp, Escherichia coli
atggcgaattatttcaacactctgaacctgcgtcaacaactggcgcaactgggtaagtgccgtttcatgggtcgtgacgagtttgcggacggtgcttcttatctgcaaggcaagaaggttgttattgttggttgcggtgcgcaaggcctgaatcaaggtctgaatatgcgcgacagcggcctggacattagctatgcgctgcgcaaggagtctatcgcggaaaaacgtgctgactggcgcaaggctactgagaacggcttcaaggttggcacctatgaggagctgattccgcaagctgacctggttatcaatctgaccccagataaagtgcatagcgacgttgttcgtactgttcaaccgctgatgaaggatggtgctgctctgggttatagccacggctttaacattgttgaggtaggtgaacaaattcgcaaggacattactgttgttatggtggctccaaagtgtccgggtactgaggttcgcgaggaatataagcgcggttttggtgttccaaccctgatcgcggtgcatccagagaatgacccaaagggtgagggtatggctatcgcgaaggcgtgggctgcggcgactggcggccatcgcgctggcgttctggagagcagctttgtggctgaggttaagagcgatctgatgggtgaacagactattctgtgtggtatgctgcaagcgggtagcctgctgtgttttgataaactggttgaggagggcactgacccggcgtatgcggagaagctgatccaatttggctgggagactattactgaggcgctgaagcaaggtggtattactctgatgatggatcgcctgagcaatccagctaagctgcgcgcgtacgctctgagcgagcaactgaaggaaattatggcaccgctgtttcaaaagcacatggatgatatcattagcggtgagtttagcagcggcatgatggctgattgggcgaatgacgacaaaaagctgctgacttggcgcgaggaaactggtaagactgctttcgagactgctccacaatacgagggtaagattggtgaacaagaatattttgacaagggtgttctgatgatcgctatggttaaggctggtgtggagctggcttttgagactatggttgacagcggtattatcgaggaaagcgcgtactacgagagcctgcatgaactgccactgatcgcgaatactattgcgcgcaaacgcctgtatgagatgaatgttgtgattagcgacactgcggaatatggcaattacctgtttagctatgcgtgcgttccactgctgaagccattcatggcggaactgcagccaggtgatctgggcaaggcgatcccagagggtgctgttgacaatggtcagctgcgcgacgttaatgaggctatccgttctcacgctatcgaacaagttggcaaaaagctgcgtggttacatgaccgacatgaagcgcatcgcggtggctggccaccaccaccaccaccactaa

SEQ ID NO: 29 - protein, 499 aa, Escherichia coli
MANYFNTLNLRQQLAQLGKCRFMGRDEFADGASYLQGKKVVIVGCGAQGLNQGLNMRDSGLDISYALRKESIAEKRADWRKATENGFKVGTYEELIPQADLVINLTPDKVHSDVVRTVQPLMKDGAALGYSHGFNIVEVGEQIRKDITVVMVAPKCPGTEVREEYKRGFGVPTLIAVHPENDPKGEGMAIAKAWAAATGGHRAGVLESSFVAEVKSDLMGEQTILCGMLQAGSLLCFDKLVEEGTDPAYAEKLIQFGWETITEALKQGGITLMMDRLSNPAKLRAYALSEQLKEIMAPLFQKHMDDIISGEFSSGMMADWANDDKKLLTWREETGKTAFETAPQYEGKIGEQEYFDKGVLMIAMVKAGVELAFETMVDSGIIEESAYYESLHELPLIANTIARKRLYEMNVVISDTAEYGNYLFSYACVPLLKPFMAELQPGDLGKAIPEGAVDNGQLRDVNEAIRSHAIEQVGKKLRGYMTDMKRIAVAGLEHHHHHH

SEQ ID NO: 30 - DNA, 1494 bp, Escherichia coli
atggcgaattatttcaacactctgaacctgcgtcaacaactggcgcaactgggtaagtgccgtttcatgggtcgtgacgagtttgcggacggtgcttcttatctgcaaggcaagaaggttgttattgttggttgcggtgcgcaaggcctgaatcaaggtctgaatatgcgcgacagcggcctggacattagctatgcgctgcgcaaggagtctatcgcggaaaaagatgctgattggcgcaaggctactgagaacggcttcaaggttggcacctatgaggagctgattccgcaagctgacctggttatcaatctgaccccagataaagcacatagcgacgttgttcgtactgttcaaccgctgatgaaggatggtgctgctctgggttatagccacggctttaacattgttgaggtaggtgaacaaattcgcaaggacattactgttgttatggtggctccaaagtgtccgggtactgaggttcgcgaggaatataagcgcggttttggtgttccaaccctgatcgcggtgcatccagagaatgacccaaagggtgagggtatggctatcgcgaaggcgtgggctgcggcgactggcggccatcgcgctggcgttctggagagcagctttgtggctgaggttaagagcgatctgatgggtgaacagactattctgtgtggtatgctgcaagcgggtagcctgctgtgttttgataaactggttgaggagggcactgacccggcgtatgcggagaagctgatccaatttggctgggagactattactgaggcgctgaagcaaggtggtattactctgatgatggatcgcctgagcaatccagctaagctgcgcgcgtacgctctgagcgagcaactgaaggaaattatggcaccgctgtttcaaaagcacatggatgatatcattagcggtgagtttagcagcggcatgatggctgattgggcgaatgacgacaaaaagctgctgacttggcgcgaggaaactggtaagactgctttcgagactgctccacaatacgagggtaagattggtgaacaagaatattttgacaagggtgttctgatgatcgctatggttaaggctggtgtggagctggcttttgagactatggttgacagcggtattatcgaggaaagcgcgtactacgagagcctgcatgaactgccactgatcgcgaatactattgcgcgcaaacgcctgtatgagatgaatgttgtgattagcgacactgcggaatatggcaattacctgtttagctatgcgtgcgttccactgctgaagccattcatggcggaactgcagccaggtgatctgggcaaggcgatcccagagggtgctgttgacaatggtcagctgcgcgacgttaatgaggctatccgttctcacgctatcgaacaagttggcaaaaagctgcgtggttacatgaccgacatgaagcgcatcgcggtggctggccaccaccaccaccaccactaa

SEQ ID NO: 31 - protein, 499 aa, Escherichia coli
MANYFNTLNLRQQLAQLGKCRFMGRDEFADGASYLQGKKVVIVGCGAQGLNQGLNMRDSGLDISYALRKESIAEKDADWRKATENGFKVGTYEELIPQADLVINLTPDKAHSDVVRTVQPLMKDGAALGYSHGFNIVEVGEQIRKDITVVMVAPKCPGTEVREEYKRGFGVPTLIAVHPENDPKGEGMAIAKAWAAATGGHRAGVLESSFVAEVKSDLMGEQTILCGMLQAGSLLCFDKLVEEGTDPAYAEKLIQFGWETITEALKQGGITLMMDRLSNPAKLRAYALSEQLKEIMAPLFQKHMDDIISGEFSSGMMADWANDDKKLLTWREETGKTAFETAPQYEGKIGEQEYFDKGVLMIAMVKAGVELAFETMVDSGIIEESAYYESLHELPLIANTIARKRLYEMNVVISDTAEYGNYLFSYACVPLLKPFMAELQPGDLGKAIPEGAVDNGQLRDVNEAIRSHAIEQVGKKLRGYMTDMKRIAVAGLEHHHHHH

SEQ ID NO: 32 - DNA, 1494 bp, Escherichia coli
atggcgaattatttcaacactctgaacctgcgtcaacaactggcgcaactgggtaagtgccgtttcatgggtcgtgacgagtttgcggacggtgcttcttatctgcaaggcaagaaggttgttattgttggttgcggtgcgcaaggcctgaatcaaggtctgaatatgcgcgacagcggcctggacattagctatgcgctgcgcaaggagtctatcgcggaaaaagatgctgattggcgcaaggctactgagaacggcttcaaggttggcacctatgaggagctgattccgcaagctgacctggttatcaatctgaccccagataaagtacatagcgacgttgttcgtactgttcaaccgctgatgaaggatggtgctgctctgggttatagccacggctttaacattgttgaggtaggtgaacaaattcgcaaggacattactgttgttatggtggctccaaagtgtccgggtactgaggttcgcgaggaatataagcgcggttttggtgttccaaccctgatcgcggtgcatccagagaatgacccaaagggtgagggtatggctatcgcgaaggcgtgggctgcggcgactggcggccatcgcgctggcgttctggagagcagctttgtggctgaggttaagagcgatctgatgggtgaacagactattctgtgtggtatgctgcaagcgggtagcctgctgtgttttgataaactggttgaggagggcactgacccggcgtatgcggagaagctgatccaatttggctgggagactattactgaggcgctgaagcaaggtggtattactctgatgatggatcgcctgagcaatccagctaagctgcgcgcgtacgctctgagcgagcaactgaaggaaattatggcaccgctgtttcaaaagcacatggatgatatcattagcggtgagtttagcagcggcatgatggctgattgggcgaatgacgacaaaaagctgctgacttggcgcgaggaaactggtaagactgctttcgagactgctccacaatacgagggtaagattggtgaacaagaatattttgacaagggtgttctgatgatcgctatggttaaggctggtgtggagctggcttttgagactatggttgacagcggtattatcgaggaaagcgcgtactacgagagcctgcatgaactgccactgatcgcgaatactattgcgcgcaaacgcctgtatgagatgaatgttgtgattagcgacactgcggaatatggcaattacctgtttagctatgcgtgcgttccactgctgaagccattcatggcggaactgcagccaggtgatctgggcaaggcgatcccagagggtgctgttgacaatggtcagctgcgcgacgttaatgaggctatccgttctcacgctatcgaacaagttggcaaaaagctgcgtggttacatgaccgacatgaagcgcatcgcggtggctggccaccaccaccaccaccactaa

SEQ ID NO: 33 - DNA, 1494 bp, Escherichia coli
atggccaactattttaacacattaaatttgagacaacaattggctcaactgggtaagtgcagatttatgggaagggacgagtttgctgatggtgcttcttatctgcaaggaaagaaagtagtaattgttggctgcggtgctcagggtctaaaccaaggtttaaacatgagagattcaggtctggatatttcgtatgcattgaggaaagagtctattgcagaaaaggatgccgattggcgtaaagcgacggaaaatgggttcaaagttggtacttacgaagaactgatccctcaggcagatttagtgattaacctaacaccagataaggttcactcagacgtagtaagaacagttcaaccgctgatgaaggatggggcagctttaggttactctcatggctttaatatcgttgaagtgggcgagcagatcagaaaagatataacagtcgtaatggttgcaccaaagtgcccaggtacggaagtcagagaggagtacaagaggggttttggtgtacctacattgatcgccgtacatcctgaaaatgaccccaaaggtgaaggtatggcaattgcgaaggcatgggcagccgcaaccggaggtcatagagcgggtgtgttagagagttctttcgtagctgaggtcaagagtgacttaatgggtgaacaaaccattctgtgcggaatgttgcaggcagggtctttactatgctttgataaattggtcgaagagggtacagatcctgcctatgctgaaaagttgatacaatttggttgggagacaatcaccgaggcacttaaacaaggtggcataacattgatgatggatagactttcaaatccggccaagctaagagcctacgccttatctgagcaactaaaagagatcatggcaccattattccaaaagcacatggacgatattatctccggtgagttttcctcaggaatgatggcagattgggcaaacgatgataaaaagttattgacgtggagagaagaaaccggcaagacggcattcgagacagccccacaatacgaaggtaaaattggtgaacaagaatactttgataagggagtattgatgatagctatggtgaaggcaggggtagaacttgcattcgaaactatggttgactccggtatcattgaagaatctgcatactatgagtctttgcatgaattgcctttgatagcaaatactattgcaagaaaaagactttacgagatgaatgttgtcatatcagacactgcagaatatggtaattacttatttagctacgcatgtgtcccgttgttaaagcccttcatggccgagttacaacctggtgatttggggaaggctattccggaaggagcggttgacaatggccaactgagagacgtaaatgaagctattcgttcacatgctatagaacaggtgggtaaaaagctgagaggatatatgaccgatatgaaaagaattgcagtggcaggacaccaccaccaccaccactga

SEQ ID NO: 34 - protein, 499 aa, Escherichia coli
MANYFNTLNLRQQLAQLGKCRFMGRDEFADGASYLQGKKVVIVGCGAQGLNQGLNMRDSGLDISYALRKESIAEKDADWRKATENGFKVGTYEELIPQADLVINLTPDKVHSDVVRTVQPLMKDGAALGYSHGFNIVEVGEQIRKDITVVMVAPKCPGTEVREEYKRGFGVPTLIAVHPENDPKGEGMAIAKAWAAATGGHRAGVLESSFVAEVKSDLMGEQTILCGMLQAGSLLCFDKLVEEGTDPAYAEKLIQFGWETITEALKQGGITLMMDRLSNPAKLRAYALSEQLKEIMAPLFQKHMDDIISGEFSSGMMADWANDDKKLLTWREETGKTAFETAPQYEGKIGEQEYFDKGVLMIAMVKAGVELAFETMVDSGIIEESAYYESLHELPLIANTIARKRLYEMNVVISDTAEYGNYLFSYACVPLLKPFMAELQPGDLGKAIPEGAVDNGQLRDVNEAIRSHAIEQVGKKLRGYMTDMKRIAVAGLEHHHHHH

SEQ ID NO: 35 - DNA, 1476 bp, Escherichia coli
atggccaactattttaacacattaaatttgagacaacaattggctcaactgggtaagtgcagatttatgggaagggacgagtttgctgatggtgcttcttatctgcaaggaaagaaagtagtaattgttggctgcggtgctcagggtctaaaccaaggtttaaacatgagagattcaggtctggatatttcgtatgcattgaggaaagagtctattgcagaaaaggatgccgattggcgtaaagcgacggaaaatgggttcaaagttggtacttacgaagaactgatccctcaggcagatttagtgattaacctaacaccagataaggttcactcagacgtagtaagaacagttcaaccgctgatgaaggatggggcagctttaggttactctcatggctttaatatcgttgaagtgggcgagcagatcagaaaagatataacagtcgtaatggttgcaccaaagtgcccaggtacggaagtcagagaggagtacaagaggggttttggtgtacctacattgatcgccgtacatcctgaaaatgaccccaaaggtgaaggtatggcaattgcgaaggcatgggcagccgcaaccggaggtcatagagcgggtgtgttagagagttctttcgtagctgaggtcaagagtgacttaatgggtgaacaaaccattctgtgcggaatgttgcaggcagggtctttactatgctttgataaattggtcgaagagggtacagatcctgcctatgctgaaaagttgatacaatttggttgggagacaatcaccgaggcacttaaacaaggtggcataacattgatgatggatagactttcaaatccggccaagctaagagcctacgccttatctgagcaactaaaagagatcatggcaccattattccaaaagcacatggacgatattatctccggtgagttttcctcaggaatgatggcagattgggcaaacgatgataaaaagttattgacgtggagagaagaaaccggcaagacggcattcgagacagccccacaatacgaaggtaaaattggtgaacaagaatactttgataagggagtattgatgatagctatggtgaaggcaggggtagaacttgcattcgaaactatggttgactccggtatcattgaagaatctgcatactatgagtctttgcatgaattgcctttgatagcaaatactattgcaagaaaaagactttacgagatgaatgttgtcatatcagacactgcagaatatggtaattacttatttagctacgcatgtgtcccgttgttaaagcccttcatggccgagttacaacctggtgatttggggaaggctattccggaaggagcggttgacaatggccaactgagagacgtaaatgaagctattcgttcacatgctatagaacaggtgggtaaaaagctgagaggatatatgaccgatatgaaaagaattgcagtggcaggatga

SEQ ID NO: 36 - protein, 491 aa, Escherichia coli
MANYFNTLNLRQQLAQLGKCRFMGRDEFADGASYLQGKKVVIVGCGAQGLNQGLNMRDSGLDISYALRKESIAEKDADWRKATENGFKVGTYEELIPQADLVINLTPDKVHSDVVRTVQPLMKDGAALGYSHGFNIVEVGEQIRKDITVVMVAPKCPGTEVREEYKRGFGVPTLIAVHPENDPKGEGMAIAKAWAAATGGHRAGVLESSFVAEVKSDLMGEQTILCGMLQAGSLLCFDKLVEEGTDPAYAEKLIQFGWETITEALKQGGITLMMDRLSNPAKLRAYALSEQLKEIMAPLFQKHMDDIISGEFSSGMMADWANDDKKLLTWREETGKTAFETAPQYEGKIGEQEYFDKGVLMIAMVKAGVELAFETMVDSGIIEESAYYESLHELPLIANTIARKRLYEMNVVISDTAEYGNYLFSYACVPLLKPFMAELQPGDLGKAIPEGAVDNGQLRDVNEAIRSHAIEQVGKKLRGYMTDMKRIAVAG

SEQ ID NO: 37 - DNA, 1494 bp, Escherichia coli
atggccaactattttaacacattaaatttgagacaacaattggctcaactgggtaagtgcagatttatgggaagggacgagtttgctgatggtgcttcttatctgcaaggaaagaaagtagtaattgttggctgcggtgctcagggtctaaaccaaggtttaaacatgagagattcaggtctggatatttcgtatgcattgaggaaagagtctattgcagaaaaggatgccgattggcgtaaagcgacggaaaatgggttcaaagttggtacttacgaagaactgatccctcaggcagatttagtgattaacctaacaccagataaggttcactcagacgtagtaagaacagttcaaccgctgatgaaggatggggcagctttaggttactctcatggctttaatatcgttgaagtgggcgagcagatcagaaaaggtataacagtcgtaatggttgcgccaaagtgcccaggtacggaagtcagagaggagtacaagaggggttttggtgtacctacattgatcgccgtacatcctgaaaatgaccccaaacgtgaaggtatggcaattgcgaaggcatgggcagccgcaaccggaggtcatagagcgggtgtgttagagagttctttcgtagctgaggtcaagagtgacttaatgggtgaacaaaccattctgtgcggaatgttgcaggcagggtctttactatgctttgataaattggtcgaagagggtacagatcctgcctatgctgaaaagttgatacaatttggttgggagacaatcaccgaggcacttaaacaaggtggcataacattgatgatggatagactttcaaatccggccaagctaagagcctacgccttatctgagcaactaaaagagatcatggcaccattattccaaaagcacatggacgatattatctccggtgagttttcctcaggaatgatggcagattgggcaaacgatgataaaaagttattgacgtggagagaagaaaccggcaagacggcattcgagacagccccacaatacgaaggtaaaattggtgaacaagaatactttgataagggagtattgatgatagctatggtgaaggcaggggtagaacttgcattcgaaactatggttgactccggtatcattgaagaatctgcatactatgagtctttgcatgaattgcctttgatagcaaatactattgcaagaaaaagactttacgagatgaatgttgtcatatcagacactgcagaatatggtaattacttatttagctacgcatgtgtcccgttgttaaagcccttcatggccgagttacaacctggtgatttggggaaggctattccggaaggagcggttgacaatggccaactgagagacgtaaatgaagctattcgttcacatgctatagaacaggtgggtaaaaagctgagaggatatatgaccgatatgaaaagaattgcagtggcaggacaccaccaccaccaccactga

SEQ ID NO: 38 - protein, 497 aa, Escherichia coli
MANYFNTLNLRQQLAQLGKCRFMGRDEFADGASYLQGKKVVIVGCGAQGLNQGLNMRDSGLDISYALRKESIAEKDADWRKATENGFKVGTYEELIPQADLVINLTPDKVHSDVVRTVQPLMKDGAALGYSHGFNIVEVGEQIRKGITVVMVAPKCPGTEVREEYKRGFGVPTLIAVHPENDPKREGMAIAKAWAAATGGHRAGVLESSFVAEVKSDLMGEQTILCGMLQAGSLLCFDKLVEEGTDPAYAEKLIQFGWETITEALKQGGITLMMDRLSNPAKLRAYALSEQLKEIMAPLFQKHMDDIISGEFSSGMMADWANDDKKLLTWREETGKTAFETAPQYEGKIGEQEYFDKGVLMIAMVKAGVELAFETMVDSGIIEESAYYESLHELPLIANTIARKRLYEMNVVISDTAEYGNYLFSYACVPLLKPFMAELQPGDLGKAIPEGAVDNGQLRDVNEAIRSHAIEQVGKKLRGYMTDMKRIAVAGHHHHHH

SEQ ID NO: 39 - DNA, 1476 bp, Escherichia coli
atggccaactattttaacacattaaatttgagacaacaattggctcaactgggtaagtgcagatttatgggaagggacgagtttgctgatggtgcttcttatctgcaaggaaagaaagtagtaattgttggctgcggtgctcagggtctaaaccaaggtttaaacatgagagattcaggtctggatatttcgtatgcattgaggaaagagtctattgcagaaaaggatgccgattggcgtaaagcgacggaaaatgggttcaaagttggtacttacgaagaactgatccctcaggcagatttagtgattaacctaacaccagataaggttcactcagacgtagtaagaacagttcaaccgctgatgaaggatggggcagctttaggttactctcatggctttaatatcgttgaagtgggcgagcagatcagaaaaggtataacagtcgtaatggttgcgccaaagtgcccaggtacggaagtcagagaggagtacaagaggggttttggtgtacctacattgatcgccgtacatcctgaaaatgaccccaaacgtgaaggtatggcaattgcgaaggcatgggcagccgcaaccggaggtcatagagcgggtgtgttagagagttctttcgtagctgaggtcaagagtgacttaatgggtgaacaaaccattctgtgcggaatgttgcaggcagggtctttactatgctttgataaattggtcgaagagggtacagatcctgcctatgctgaaaagttgatacaatttggttgggagacaatcaccgaggcacttaaacaaggtggcataacattgatgatggatagactttcaaatccggccaagctaagagcctacgccttatctgagcaactaaaagagatcatggcaccattattccaaaagcacatggacgatattatctccggtgagttttcctcaggaatgatggcagattgggcaaacgatgataaaaagttattgacgtggagagaagaaaccggcaagacggcattcgagacagccccacaatacgaaggtaaaattggtgaacaagaatactttgataagggagtattgatgatagctatggtgaaggcaggggtagaacttgcattcgaaactatggttgactccggtatcattgaagaatctgcatactatgagtctttgcatgaattgcctttgatagcaaatactattgcaagaaaaagactttacgagatgaatgttgtcatatcagacactgcagaatatggtaattacttatttagctacgcatgtgtcccgttgttaaagcccttcatggccgagttacaacctggtgatttggggaaggctattccggaaggagcggttgacaatggccaactgagagacgtaaatgaagctattcgttcacatgctatagaacaggtgggtaaaaagctgagaggatatatgaccgatatgaaaagaattgcagtggcaggatga

SEQ ID NO: 40 - protein, 491 aa, Escherichia coli
MANYFNTLNLRQQLAQLGKCRFMGRDEFADGASYLQGKKVVIVGCGAQGLNQGLNMRDSGLDISYALRKESIAEKDADWRKATENGFKVGTYEELIPQADLVINLTPDKVHSDVVRTVQPLMKDGAALGYSHGFNIVEVGEQIRKGITVVMVAPKCPGTEVREEYKRGFGVPTLIAVHPENDPKREGMAIAKAWAAATGGHRAGVLESSFVAEVKSDLMGEQTILCGMLQAGSLLCFDKLVEEGTDPAYAEKLIQFGWETITEALKQGGITLMMDRLSNPAKLRAYALSEQLKEIMAPLFQKHMDDIISGEFSSGMMADWANDDKKLLTWREETGKTAFETAPQYEGKIGEQEYFDKGVLMIAMVKAGVELAFETMVDSGIIEESAYYESLHELPLIANTIARKRLYEMNVVISDTAEYGNYLFSYACVPLLKPFMAELQPGDLGKAIPEGAVDNGQLRDVNEAIRSHAIEQVGKKLRGYMTDMKRIAVAG

SEQ ID NO: 41 - DNA, 1494 bp, Escherichia coli
atggccaactattttaacacattaaatttgagacaacaattggctcaactgggtaagtgcagatttatgggaagggacgagtttgctgatggtgcttcttatctgcaaggaaagaaagtagtaattgttggctgcggtgctcagggtctaaaccaaggtttaaacatgagagattcaggtctggatatttcgtatgcattgaggaaagagtctattgcagaaaaggatgccgattggcgtaaagcgacggaaaatgggttcaaagttggtacttacgaagaactgatccctcaggcagatttagtgattaacctaacaccagataaggttcactcagacgtagtaagaacagttcaaccgctgatgaaggatggggcagctttaggttactctcatggctttaatatcgttgaagtgggcgagcagatcagaaaaggtataacagtcgtaatggttgcgccaaagtgcccaggtacggaagtcagagaggagtacaagaggggttttggtgtacctacattgatcgccgtacatcctgaaaatgaccccaaacgtgaaggtatggcaatagcgaaggcatgggcagccgcaaccggaggtcatagagcgggtgtgttagagagttctttcgtagctgaggtcaagagtgacttaatgggtgaacaaaccattctgtgcggaatgttgcaggcagggtctttactatgctttgataaattggtcgaagagggtacagatcctgcctatgctgaaaagttgatacaatttggttgggagacaatcaccgaggcacttaaacaaggtggcataacattgatgatggatagactttcaaatccggccaagctaagagcctacgccttatctgagcaactaaaagagatcatggcaccattattccaaaagcacatggacgatattatctccggtgagttttcctcaggaatgatggcagattgggcaaacgatgataaaaagttattgacgtggagagaagaaaccggcaagacggcattcgagacagccccacaatacgaaggtaaaattggtgaacaagaatactttgataagggagtattgatgatagctatggtgaaggcaggggtagaacttgcattcgaaactatggttgactccggtatcattgaagaatctgcatactatgagtctttgcatgaattgcctttgatagcaaatactattgcaagaaaaagactttacgagatgaatgttgtcatatcagacactgcagaatatggtaattacttatttagctacgcgtgtgtcccgttgttagagcccttcatggccgagttacaacctggtgatttggggaaggctattccggaaggagcggttgacaatggccaactgagagacgtaaatgaagctattcgttcgcatgctatagaacaggtgggtaaaaagctgagaggatatatgaccgatatgaaaagaattgcagtggcaggacaccaccaccaccaccactga

SEQ ID NO: 42 - protein, 497 aa, Escherichia coli
MANYFNTLNLRQQLAQLGKCRFMGRDEFADGASYLQGKKVVIVGCGAQGLNQGLNMRDSGLDISYALRKESIAEKDADWRKATENGFKVGTYEELIPQADLVINLTPDKVHSDVVRTVQPLMKDGAALGYSHGFNIVEVGEQIRKGITVVMVAPKCPGTEVREEYKRGFGVPTLIAVHPENDPKREGMAIAKAWAAATGGHRAGVLESSFVAEVKSDLMGEQTILCGMLQAGSLLCFDKLVEEGTDPAYAEKLIQFGWETITEALKQGGITLMMDRLSNPAKLRAYALSEQLKEIMAPLFQKHMDDIISGEFSSGMMADWANDDKKLLTWREETGKTAFETAPQYEGKIGEQEYFDKGVLMIAMVKAGVELAFETMVDSGIIEESAYYESLHELPLIANTIARKRLYEMNVVISDTAEYGNYLFSYACVPLLEPFMAELQPGDLGKAIPEGAVDNGQLRDVNEAIRSHAIEQVGKKLRGYMTDMKRIAVAGHHHHHH

SEQ ID NO: 43 - DNA, 1476 bp, Escherichia coli
atggccaactattttaacacattaaatttgagacaacaattggctcaactgggtaagtgcagatttatgggaagggacgagtttgctgatggtgcttcttatctgcaaggaaagaaagtagtaattgttggctgcggtgctcagggtctaaaccaaggtttaaacatgagagattcaggtctggatatttcgtatgcattgaggaaagagtctattgcagaaaaggatgccgattggcgtaaagcgacggaaaatgggttcaaagttggtacttacgaagaactgatccctcaggcagatttagtgattaacctaacaccagataaggttcactcagacgtagtaagaacagttcaaccgctgatgaaggatggggcagctttaggttactctcatggctttaatatcgttgaagtgggcgagcagatcagaaaaggtataacagtcgtaatggttgcgccaaagtgcccaggtacggaagtcagagaggagtacaagaggggttttggtgtacctacattgatcgccgtacatcctgaaaatgaccccaaacgtgaaggtatggcaatagcgaaggcatgggcagccgcaaccggaggtcatagagcgggtgtgttagagagttctttcgtagctgaggtcaagagtgacttaatgggtgaacaaaccattctgtgcggaatgttgcaggcagggtctttactatgctttgataaattggtcgaagagggtacagatcctgcctatgctgaaaagttgatacaatttggttgggagacaatcaccgaggcacttaaacaaggtggcataacattgatgatggatagactttcaaatccggccaagctaagagcctacgccttatctgagcaactaaaagagatcatggcaccattattccaaaagcacatggacgatattatctccggtgagttttcctcaggaatgatggcagattgggcaaacgatgataaaaagttattgacgtggagagaagaaaccggcaagacggcattcgagacagccccacaatacgaaggtaaaattggtgaacaagaatactttgataagggagtattgatgatagctatggtgaaggcaggggtagaacttgcattcgaaactatggttgactccggtatcattgaagaatctgcatactatgagtctttgcatgaattgcctttgatagcaaatactattgcaagaaaaagactttacgagatgaatgttgtcatatcagacactgcagaatatggtaattacttatttagctacgcgtgtgtcccgttgttagagcccttcatggccgagttacaacctggtgatttggggaaggctattccggaaggagcggttgacaatggccaactgagagacgtaaatgaagctattcgttcgcatgctatagaacaggtgggtaaaaagctgagaggatatatgaccgatatgaaaagaattgcagtggcaggatga

SEQ ID NO: 44 - protein, 491 aa, Escherichia coli
MANYFNTLNLRQQLAQLGKCRFMGRDEFADGASYLQGKKVVIVGCGAQGLNQGLNMRDSGLDISYALRKESIAEKDADWRKATENGFKVGTYEELIPQADLVINLTPDKVHSDVVRTVQPLMKDGAALGYSHGFNIVEVGEQIRKGITVVMVAPKCPGTEVREEYKRGFGVPTLIAVHPENDPKREGMAIAKAWAAATGGHRAGVLESSFVAEVKSDLMGEQTILCGMLQAGSLLCFDKLVEEGTDPAYAEKLIQFGWETITEALKQGGITLMMDRLSNPAKLRAYALSEQLKEIMAPLFQKHMDDIISGEFSSGMMADWANDDKKLLTWREETGKTAFETAPQYEGKIGEQEYFDKGVLMIAMVKAGVELAFETMVDSGIIEESAYYESLHELPLIANTIARKRLYEMNVVISDTAEYGNYLFSYACVPLLEPFMAELQPGDLGKAIPEGAVDNGQLRDVNEAIRSHAIEQVGKKLRGYMTDMKRIAVAG

SEQ ID NO: 45 - DNA, 1647 bp, Lactococcus lactis
atgtatacagtaggagattacctattagaccgattacacgagttaggaattgaagaaatttttggagtccctggagactataacttacaatttttagatcaaattatttcccgcaaggatatgaaatgggtcggaaatgctaatgaattaaatgcttcatatatggctgatggctatgctcgtactaaaaaagctgccgcatttcttacaacctttggagtaggtgaattgagtgcagttaatggattagcaggaagttacgccgaaaatttaccagtagtagaaatagtgggatcacctacatcaaaagttcaaaatgaaggaaaatttgttcatcatacgctggctgacggtgattttaaacactttatgaaaatgcacgaacctgttacagcagctcgaactttactgacagcagaaaatgcaaccgttgaaattgaccgagtactttctgcactattaaaagaaagaaaacctgtctatatcaacttaccagttgatgttgctgctgcaaaagcagagaaaccctcactccctttgaaaaaagaaaactcaacttcaaatacaagtgaccaagagatcttgaacaaaattcaagaaagcttgaaaaatgccaaaaaaccaatcgtgattacaggacatgaaataattagttttggcttagaaaaaacagtctctcaatttatttcaaagacaaaactacctattacgacattaaactttggaaaaagttcagttgatgaagctctcccttcatttttaggaatctataatggtaaactctcagagcctaatcttaaagaattcgtggaatcagccgacttcatcctgatgcttggagttaaactcacagactcttcaacaggagccttcactcatcatttaaatgaaaataaaatgatttcactgaatatagatgaaggaaaaatatttaacgaaagcatccaaaattttgattttgaatccctcatctcctctctcttagacctaagcgaaatagaatacaaaggaaaatatatcgataaaaagcaagaagactttgttccatcaaatgcgcttttatcacaagaccgcctatggcaagcagttgaaaacctaactcaaagcaatgaaacaatcgttgctgaacaagggacatcattctttggcgcttcatcaattttcttaaaaccaaagagtcattttattggtcaacccttatggggatcaattggatatacattcccagcagcattaggaagccaaattgcagataaagaaagcagacaccttttatttattggtgatggttcacttcaacttacggtgcaagaattaggattagcaatcagagaaaaaattaatccaatttgctttattatcaataatgatggttatacagtcgaaagagaaattcatggaccaaatcaaagctacaatgatattccaatgtggaattactcaaaattaccagaatcatttggagcaacagaagaacgagtagtctcgaaaatcgttagaactgaaaatgaatttgtgtctgtcatgaaagaagctcaagcagatccaaatagaatgtactggattgagttaattttggcaaaagaagatgcaccaaaagtactgaaaaaaatgggcaaactatttgctgaacaaaataaatcataa

SEQ ID NO: 46 - DNA, 1647 bp, Lactococcus lactis
atgtatactgttggtgattatctgctggatcgtctgcatgaactgggtattgaggagatctttggtgttccgggcgactacaacctgcagttcctggatcagatcatttcccgtaaggatatgaaatgggttggcaacgccaacgagctgaatgctagctatatggctgatggttatgcgcgtaccaaaaaggcggctgccttcctgaccacgttcggtgttggcgaactgtctgccgtcaacggcctggctggtagctatgctgagaacctgccagtggttgaaattgttggttctcctacctctaaagttcagaacgaaggtaaattcgtgcatcacactctggctgacggtgatttcaaacacttcatgaaaatgcacgagccggtgaccgctgcccgtactctgctgacggctgagaacgcgactgtggagatcgaccgtgtgctgtctgcactgctgaaagagcgtaaaccggtgtacattaacctgccggtggatgtcgccgcagctaaagcagagaaaccgtctctgccgctgaaaaaggagaacagcacgtctaacacgtccgatcaggagatcctgaacaaaatccaggagtccctgaaaaacgcgaagaaaccgatcgtaatcactggtcatgaaattatcagctttggcctggaaaagactgtaagccagtttatctctaaaaccaaactgccgatcaccactctgaatttcggcaaaagcagcgttgatgaggcactgccttccttcctgggcatttataacggtaaactgtccgagccgaacctgaaagagttcgttgagtccgccgatttcattctgatgctgggcgtcaaactgactgactcttctactggtgccttcacccaccacctgaacgaaaacaaaatgatttccctgaacattgatgagggtaaaatcttcaacgaaagcatccagaacttcgacttcgaatctctgatctcctctctgctggatctgagcgagatcgaatacaagggcaaatacattgataagaaacaggaggacttcgttccgtctaacgctctgctgagccaggaccgtctgtggcaggcagtcgaaaacctgacccagtccaacgaaaccatcgttgcagagcagggtacttccttcttcggtgcctcttctatcttcctgaaaccgaagtcccacttcattggccagccgctgtggggtagcatcggctataccttccctgcagctctgggttctcagattgcggataaagaatctcgccatctgctgttcatcggcgacggcagcctgcagctgaccgttcaggaactgggcctggctatccgtgaaaagatcaacccaatttgcttcatcatcaataacgacggttacactgtggaacgcgagatccacggtccgaaccagtcttacaacgatatcccgatgtggaactactccaagctgccagagagcttcggtgctactgaggaacgtgtcgttagcaagatcgtacgcaccgaaaatgagttcgtaagcgttatgaaagaagctcaagctgatccgaaccgcatgtattggatcgagctgatcctggcaaaagaggatgccccaaaagttctgaagaaaatgggcaaactgttcgccgagcaaaacaaatcataa

SEQ ID NO: 47 - protein, 548 aa, Lactococcus lactis
MYTVGDYLLDRLHELGIEEIFGVPGDYNLQFLDQIISRKDMKWVGNANELNASYMADGYARTKKAAAFLTTFGVGELSAVNGLAGSYAENLPVVEIVGSPTSKVQNEGKFVHHTLADGDFKHFMKMHEPVTAARTLLTAENATVEIDRVLSALLKERKPVYINLPVDVAAAKAEKPSLPLKKENSTSNTSDQEILNKIQESLKNAKKPIVITGHEIISFGLEKTVSQFISKTKLPITTLNFGKSSVDEALPSFLGIYNGKLSEPNLKEFVESADFILMLGVKLTDSSTGAFTHHLNENKMISLNIDEGKIFNESIQNFDFESLISSLLDLSEIEYKGKYIDKKQEDFVPSNALLSQDRLWQAVENLTQSNETIVAEQGTSFFGASSIFLKPKSHFIGQPLWGSIGYTFPAALGSQIADKESRHLLFIGDGSLQLTVQELGLAIREKINPICFIINNDGYTVEREIHGPNQSYNDIPMWNYSKLPESFGATEERVVSKIVRTENEFVSVMKEAQADPNRMYWIELILAKEDAPKVLKKMGKLFAEQNKS

SEQ ID NO: 48 - DNA, 1647 bp, Lactococcus lactis
atgtatactgttggtgattatctgctggaccgtctgcatgaactgggtatcgaagaaatcttcggcgttccgggtgattacaatctgcagttcctggatcagatcatctctcataaagacatgaaatgggtgggtaacgctaacgaactgaacgcaagctacatggcagatggttatgcacgtaccaagaaagccgcggcatttctgaccactttcggtgttggcgaactgagcgccgtcaacggtctggcgggctcctacgccgaaaacctgccggtggtggagatcgtaggcagcccaacgagcaaagttcagaacgaaggtaaattcgtccaccacactctggctgacggcgatttcaaacacttcatgaaaatgcatgaacctgtgactgcggcacgtacgctgctgactgcagagaacgctactgtggaaatcgaccgcgttctgtctgcgctgctgaaagaacgcaaaccagtttacatcaacctgcctgtggatgttgcggcagctaaagcggaaaaaccgagcctgccgctgaagaaagaaaactccacttctaacactagcgaccaggaaatcctgaacaaaatccaggagtctctgaaaaacgcaaagaaaccaatcgtgatcaccggccacgaaatcatttcttttggtctggagaagaccgtgacccaattcatcagcaaaaccaaactgccgattaccaccctgaacttcggcaagtcctctgttgacgaggctctgccgtctttcctgggcatctacaacggtactctgagcgaaccgaacctgaaagaatttgttgaatctgcggacttcatcctgatgctgggcgttaaactgaccgactcttctaccggtgcattcactcaccatctgaacgaaaacaaaatgattagcctgaacatcgacgagggtaaaatcttcaacgagcgtatccagaacttcgacttcgaaagcctgatcagctctctgctggacctgtccgaaatcgagtataaaggcaaatacattgacaaaaagcaagaagatttcgtaccatctaacgcactgctgtcccaggatcgcctgtggcaggccgtggagaacctgacccagagcaatgaaaccatcgtggcggaacaaggtacgagctttttcggcgcgtcttctatctttctgaaatccaaaagccattttatcggtcagccgctgtggggtagcattggctatactttcccggcagcgctgggctctcagatcgctgataaagaatctcgtcatctgctgttcatcggtgacggttccctgcagctgaccgtacaggaactgggtctggcaattcgtgaaaagatcaacccgatttgcttcattattaacaatgacggctacaccgttgagcgtgagatccacggtccgaaccagtcttacaacgatatccctatgtggaactactctaaactgccggagtccttcggcgcaactgaggaccgtgttgtgtctaaaattgtgcgtaccgaaaacgaatttgtgagcgtgatgaaagaggcccaggccgatccgaaccgtatgtactggatcgaactgatcctggcgaaagaaggcgcaccgaaggtactgaagaaaatgggcaagctgtttgctgaacagaataaatcctaa

SEQ ID NO: 49 - protein, 548 aa, Lactococcus lactis
MYTVGDYLLDRLHELGIEEIFGVPGDYNLQFLDQIISHKDMKWVGNANELNASYMADGYARTKKAAAFLTTFGVGELSAVNGLAGSYAENLPVVEIVGSPTSKVQNEGKFVHHTLADGDFKHFMKMHEPVTAARTLLTAENATVEIDRVLSALLKERKPVYINLPVDVAAAKAEKPSLPLKKENSTSNTSDQEILNKIQESLKNAKKPIVITGHEIISFGLEKTVTQFISKTKLPITTLNFGKSSVDEALPSFLGIYNGTLSEPNLKEFVESADFILMLGVKLTDSSTGAFTHHLNENKMISLNIDEGKIFNERIQNFDFESLISSLLDLSEIEYKGKYIDKKQEDFVPSNALLSQDRLWQAVENLTQSNETIVAEQGTSFFGASSIFLKSKSHFIGQPLWGSIGYTFPAALGSQIADKESRHLLFIGDGSLQLTVQELGLAIREKINPICFIINNDGYTVEREIHGPNQSYNDIPMWNYSKLPESFGATEDRVVSKIVRTENEFVSVMKEAQADPNRMYWIELILAKEGAPKVLKKMGKLFAEQNKS

SEQ ID NO: 50 - DNA, 1851 bp, Escherichia coli
atgcctaagtaccgttccgccaccaccactcatggtcgtaatatggcgggtgctcgtgcgctgtggcgcgccaccggaatgaccgacgccgatttcggtaagccgattatcgcggttgtgaactcgttcacccaatttgtaccgggtcacgtccatctgcgcgatctcggtaaactggtcgccgaacaaattgaagcggctggcggcgttgccaaagagttcaacaccattgcggtggatgatgggattgccatgggccacggggggatgctttattcactgccatctcgcgaactgatcgctgattccgttgagtatatggtcaacgcccactgcgccgacgccatggtctgcatctctaactgcgacaaaatcaccccggggatgctgatggcttccctgcgcctgaatattccggtgatctttgtttccggcggcccgatggaggccgggaaaaccaaactttccgatcagatcatcaagctcgatctggttgatgcgatgatccagggcgcagacccgaaagtatctgactcccagagcgatcaggttgaacgttccgcgtgtccgacctgcggttcctgctccgggatgtttaccgctaactcaatgaactgcctgaccgaagcgctgggcctgtcgcagccgggcaacggctcgctgctggcaacccacgccgaccgtaagcagctgttccttaatgctggtaaacgcattgttgaattgaccaaacgttattacgagcaaaacgacgaaagtgcactgccgcgtaatatcgccagtaaggcggcgtttgaaaacgccatgacgctggatatcgcgatgggtggatcgactaacaccgtacttcacctgctggcggcggcgcaggaagcggaaatcgacttcaccatgagtgatatcgataagctttcccgcaaggttccacagctgtgtaaagttgcgccgagcacccagaaataccatatggaagatgttcaccgtgctggtggtgttatcggtattctcggcgaactggatcgcgcggggttactgaaccgtgatgtgaaaaacgtacttggcctgacgttgccgcaaacgctggaacaatacgacgttatgctgacccaggatgacgcggtaaaaaatatgttccgcgcaggtcctgcaggcattcgtaccacacaggcattctcgcaagattgccgttgggatacgctggacgacgatcgcgccaatggctgtatccgctcgctggaacacgcctacagcaaagacggcggcctggcggtgctctacggtaactttgcggaaaacggctgcatcgtgaaaacggcaggcgtcgatgacagcatcctcaaattcaccggcccggcgaaagtgtacgaaagccaggacgatgcggtagaagcgattctcggcggtaaagttgtcgccggagatgtggtagtaattcgctatgaaggcccgaaaggcggtccggggatgcaggaaatgctctacccaaccagcttcctgaaatcaatgggtctcggcaaagcctgtgcgctgatcaccgacggtcgtttctctggtggcacctctggtctttccatcggccacgtctcaccggaagcggcaagcggcggcagcattggcctgattgaagatggtgacctgatcgctatcgacatcccgaaccgtggcattcagttacaggtaagcgatgccgaactggcggcgcgtcgtgaagcgcaggacgctcgaggtgacaaagcctggacgccgaaaaatcgtgaacgtcaggtctcctttgccctgcgtgcttatgccagcctggcaaccagcgccgacaaaggcgcggtgcgcgataaatcgaaactggggggttaa

SEQ ID NO: 51 - DNA, 1851 bp, Escherichia coli
atgcctaaatatcgcagcgcaactactacccacggccgcaacatggcaggcgcgcgtgctctgtggcgtgcgactggtatgactgatgcggactttggcaaaccaatcattgctgtggttaatagctttactcagttcgttccaggccatgttcacctgcgtgacctgggcaagctggttgcggagcagatcgaggctgcgggtggtgtggcgaaggaatttaacaccatcgctgttgacgacggtatcgcgatgggtcatggtggtatgctgtacagcctgccgagccgtgagctgattgcggacagcgtggaatacatggttaatgcgcattgtgcggatgcgatggtttgtattagcaactgtgataagattactccaggtatgctgatggcgagcctgcgtctgaacatcccagttattttcgtgagcggtggtccaatggaagcgggtaagactaagctgagcgaccagattatcaaactggacctggtggacgctatgattcaaggtgctgatccaaaggttagcgatagccaatctgaccaagtggagcgcagcgcttgcccaacttgtggcagctgtagcggtatgttcactgcgaatagcatgaattgtctgactgaggctctgggtctgagccaaccaggtaatggtagcctgctggcgactcatgcggatcgcaaacaactgtttctgaacgcgggcaagcgtatcgtggagctgactaagcgctactatgaacagaatgatgagtccgcgctgccacgcaacattgcgtccaaagctgctttcgagaatgcgatgaccctggacattgctatgggcggtagcaccaatactgttctgcatctgctggctgctgctcaagaggctgagattgattttactatgtccgacattgacaaactgagccgtaaagtgccgcaactgtgcaaggtggctccatctactcaaaagtatcacatggaggacgtgcatcgcgcgggtggcgtgattggcatcctgggtgagctggaccgtgctggtctgctgaatcgcgacgttaagaatgttctgggtctgaccctgccacagaccctggagcagtatgatgtgatgctgactcaagacgatgctgttaagaacatgtttcgtgctggtccggcgggtatccgcactacccaagcgtttagccaggactgtcgctgggacaccctggatgatgaccgtgcgaacggttgcattcgtagcctggaacatgcgtattctaaggatggtggtctggctgttctgtatggcaatttcgctgagaatggttgtattgttaagaccgcgggtgttgacgattctattctgaagtttactggtccagctaaggtttatgagtctcaagatgacgctgttgaggctatcctgggtggcaaggtggttgcgggtgacgttgttgttatccgttacgagggtccaaagggtggcccaggtatgcaagagatgctgtatccgacttcttttctgaagagcatgggcctgggtaaggcgtgcgctctgattactgatggccgctttagcggcggtactagcggcctgagcattggtcatgttagcccagaggctgcgtctggtggttctatcggtctgatcgaggacggcgatctgattgcgattgatattccaaatcgcggtatccaactgcaagtttctgacgcggagctggctgctcgccgcgaggctcaagatgcgcgtggcgataaggcgtggaccccaaagaaccgcgagcgccaagttagcttcgcgctgcgcgcgtacgcctctctggcgacttctgcggataagggtgctgttcgtgacaagagcaagctgggtggctaa

SEQ ID NO: 52 - protein, 616 aa, Escherichia coli
MPKYRSATTTHGRNMAGARALWRATGMTDADFGKPIIAVVNSFTQFVPGHVHLRDLGKLVAEQIEAAGGVAKEFNTIAVDDGIAMGHGGMLYSLPSRELIADSVEYMVNAHCADAMVCISNCDKITPGMLMASLRLNIPVIFVSGGPMEAGKTKLSDQIIKLDLVDAMIQGADPKVSDSQSDQVERSACPTCGSCSGMFTANSMNCLTEALGLSQPGNGSLLATHADRKQLFLNAGKRIVELTKRYYEQNDESALPRNIASKAAFENAMTLDIAMGGSTNTVLHLLAAAQEAEIDFTMSDIDKLSRKVPQLCKVAPSTQKYHMEDVHRAGGVIGILGELDRAGLLNRDVKNVLGLTLPQTLEQYDVMLTQDDAVKNMFRAGPAGIRTTQAFSQDCRWDTLDDDRANGCIRSLEHAYSKDGGLAVLYGNFAENGCIVKTAGVDDSILKFTGPAKVYESQDDAVEAILGGKVVAGDVVVIRYEGPKGGPGMQEMLYPTSFLKSMGLGKACALITDGRFSGGTSGLSIGHVSPEAASGGSIGLIEDGDLIAIDIPNRGIQLQVSDAELAARREAQDARGDKAWTPKNRERQVSFALRAYASLATSADKGAVRDKSKLGG

SEQ ID NO: 53 - skipped

SEQ ID NO: 54 - DNA, 1713 bp, Lactococcus lactis
atggagtttaagtataacggcaaagttgaatctgttgaactgaataagtacagcaaaacgttgacacaagatcccacacaacccgccacacaggcaatgtattacggcatcgggtttaaagacgaagatttcaagaaagctcaagtgggtatagtgtcgatggactgggatggaaatccatgcaacatgcatttaggaacccttggatcaaagattaaaagctcagtaaatcagacagatggtctgatcggcttacaatttcatacgataggagtttctgatgggatagcaaatggaaagttgggaatgagatactcccttgtttccagagaagttatagctgactctattgaaaccaacgctggcgctgaatactatgatgcaattgtagccatcccaggttgtgacaaaaatatgccaggttctattattggtatggcaagacttaataggccaagcattatggtgtatggaggaacaatagaacacggtgaatataaaggtgagaaattgaacatcgtatcggcttttgaatctctaggccagaaaattaccggcaatatctctgatgaagattatcacggtgttatttgtaatgctattcctggtcaaggggcatgtggggggatgtacacagctaataccttagctgccgctatcgaaacactaggtatgtcattgccgtattcttcttcgaaccctgcagtatctcaagaaaaacaagaagaatgtgatgagattggattagccattaagaatcttttggaaaaagacatcaagcctagtgatataatgactaaggaggcgttcgagaacgctattaccattgtgatggtcttggggggtagtactaatgctgtcttgcatattattgcaatggctaacgcgataggtgtcgaaataactcaggatgacttccaaagaattagtgacattactccagtactaggtgattttaaaccttcaggtaaatatatgatggaagatttgcataaaattggaggcttgccagcagtgcttaagtaccttctaaaggaaggaaaattgcatggtgactgccttactgtgacgggtaaaacattagccgagaatgtcgagactgccctagacttggatttcgactcacaagatatcatgaggccactaaagaatcctatcaaggccaccggccacttgcagattctgtacggtaatttagctcaagggggttccgtagcaaaaattagcggtaaagaaggagagttcttcaaaggcactgccagagtctttgatggtgaacaacattttatcgacggcatagaatctggtcgtttgcatgctggagatgtagcggtaattaggaatataggtcccgtcggcggacctggtatgcccgaaatgctgaagcctacatcagcattaattggtgcgggtttagggaaaagttgcgcgttaattacggatggtagattctccggtggcactcacggttttgttgtcggccatattgtgcctgaagccgttgagggtggactaatcggcttagttgaagatgacgatataatagagatagatgcagtcaacaactctatatccctgaaagtttccgatgaagaaatcgcaaagagaagagctaattatcagaagccaactccgaaagccaccaggggagttttggcaaaattcgctaaattaacccgtcctgcatcggaagggtgtgttactgatctgtaa

SEQ ID NO: 55 - protein, 570 aa, Lactococcus lactis
MEFKYNGKVESVELNKYSKTLTQDPTQPATQAMYYGIGFKDEDFKKAQVGIVSMDWDGNPCNMHLGTLGSKIKSSVNQTDGLIGLQFHTIGVSDGIANGKLGMRYSLVSREVIADSIETNAGAEYYDAIVAIPGCDKNMPGSIIGMARLNRPSIMVYGGTIEHGEYKGEKLNIVSAFESLGQKITGNISDEDYHGVICNAIPGQGACGGMYTANTLAAAIETLGMSLPYSSSNPAVSQEKQEECDEIGLAIKNLLEKDIKPSDIMTKEAFENAITIVMVLGGSTNAVLHIIAMANAIGVEITQDDFQRISDITPVLGDFKPSGKYMMEDLHKIGGLPAVLKYLLKEGKLHGDCLTVTGKTLAENVETALDLDFDSQDIMRPLKNPIKATGHLQILYGNLAQGGSVAKISGKEGEFFKGTARVFDGEQHFIDGIESGRLHAGDVAVIRNIGPVGGPGMPEMLKPTSALIGAGLGKSCALITDGRFSGGTHGFVVGHIVPEAVEGGLIGLVEDDDIIEIDAVNNSISLKVSDEEIAKRRANYQKPTPKATRGVLAKFAKLTRPASEGCVTDL

SEQ ID NO: 56 - DNA, 1758 bp, Saccharomyces cerevisiae
atgggcttgttaacgaaagttgctacatctagacaattctctacaacgagatgcgttgcaaagaagctcaacaagtactcgtatatcatcactgaacctaagggccaaggtgcgtcccaggccatgctttatgccaccggtttcaagaaggaagatttcaagaagcctcaagtcggggttggttcctgttggtggtccggtaacccatgtaacatgcatctattggacttgaataacagatgttctcaatccattgaaaaagcgggtttgaaagctatgcagttcaacaccatcggtgtttcagacggtatctctatgggtactaaaggtatgagatactcgttacaaagtagagaaatcattgcagactcctttgaaaccatcatgatggcacaacactacgatgctaacatcgccatcccatcatgtgacaaaaacatgcccggtgtcatgatggccatgggtagacataacagaccttccatcatggtatatggtggtactatcttgcccggtcatccaacatgtggttcttcgaagatctctaaaaacatcgatatcgtctctgcgttccaatcctacggtgaatatatttccaagcaattcactgaagaagaaagagaagatgttgtggaacatgcatgcccaggtcctggttcttgtggtggtatgtatactgccaacacaatggcttctgccgctgaagtgctaggtttgaccattccaaactcctcttccttcccagccgtttccaaggagaagttagctgagtgtgacaacattggtgaatacatcaagaagacaatggaattgggtattttacctcgtgatatcctcacaaaagaggcttttgaaaacgccattacttatgtcgttgcaaccggtgggtccactaatgctgttttgcatttggtggctgttgctcactctgcgggtgtcaagttgtcaccagatgatttccaaagaatcagtgatactacaccattgatcggtgacttcaaaccttctggtaaatacgtcatggccgatttgattaacgttggtggtacccaatctgtgattaagtatctatatgaaaacaacatgttgcacggtaacacaatgactgttaccggtgacactttggcagaacgtgcaaagaaagcaccaagcctacctgaaggacaagagattattaagccactctcccacccaatcaaggccaacggtcacttgcaaattctgtacggttcattggcaccaggtggagctgtgggtaaaattaccggtaaggaaggtacttacttcaagggtagagcacgtgtgttcgaagaggaaggtgcctttattgaagccttggaaagaggtgaaatcaagaagggtgaaaaaaccgttgttgttatcagatatgaaggtccaagaggtgcaccaggtatgcctgaaatgctaaagccttcctctgctctgatgggttacggtttgggtaaagatgttgcattgttgactgatggtagattctctggtggttctcacgggttcttaatcggccacattgttcccgaagccgctgaaggtggtcctatcgggttggtcagagacggcgatgagattatcattgatgctgataataacaagattgacctattagtctctgataaggaaatggctcaacgtaaacaaagttgggttgcacctccacctcgttacacaagaggtactctatccaagtatgctaagttggtttccaacgcttccaacggttgtgttttagatgcttga

SEQ ID NO: 57 - protein, 585 aa, Saccharomyces cerevisiae
MGLLTKVATSRQFSTTRCVAKKLNKYSYIITEPKGQGASQAMLYATGFKKEDFKKPQVGVGSCWWSGNPCNMHLLDLNNRCSQSIEKAGLKAMQFNTIGVSDGISMGTKGMRYSLQSREIIADSFETIMMAQHYDANIAIPSCDKNMPGVMMAMGRHNRPSIMVYGGTILPGHPTCGSSKISKNIDIVSAFQSYGEYISKQFTEEEREDVVEHACPGPGSCGGMYTANTMASAAEVLGLTIPNSSSFPAVSKEKLAECDNIGEYIKKTMELGILPRDILTKEAFENAITYVVATGGSTNAVLHLVAVAHSAGVKLSPDDFQRISDTTPLIGDFKPSGKYVMADLINVGGTQSVIKYLYENNMLHGNTMTVTGDTLAERAKKAPSLPEGQEIIKPLSHPIKANGHLQILYGSLAPGGAVGKITGKEGTYFKGRARVFEEEGAFIEALERGEIKKGEKTVVVIRYEGPRGAPGMPEMLKPSSALMGYGLGKDVALLTDGRFSGGSHGFLIGHIVPEAAEGGPIGLVRDGDEIIIDADNNKIDLLVSDKEMAQRKQSWVAPPPRYTRGTLSKYAKLVSNASNGCVLDA

SEQ ID NO: 58 - DNA, 1701 bp, Saccharomyces cerevisiae
atgaagaagctcaacaagtactcgtatatcatcactgaacctaagggccaaggtgcgtcccaggccatgctttatgccaccggtttcaagaaggaagatttcaagaagcctcaagtcggggttggttcctgttggtggtccggtaacccatgtaacatgcatctattggacttgaataacagatgttctcaatccattgaaaaagcgggtttgaaagctatgcagttcaacaccatcggtgtttcagacggtatctctatgggtactaaaggtatgagatactcgttacaaagtagagaaatcattgcagactcctttgaaaccatcatgatggcacaacactacgatgctaacatcgccatcccatcatgtgacaaaaacatgcccggtgtcatgatggccatgggtagacataacagaccttccatcatggtatatggtggtactatcttgcccggtcatccaacatgtggttcttcgaagatctctaaaaacatcgatatcgtctctgcgttccaatcctacggtgaatatatttccaagcaattcactgaagaagaaagagaagatgttgtggaacatgcatgcccaggtcctggttcttgtggtggtatgtatactgccaacacaatggcttctgccgctgaagtgctaggtttgaccattccaaactcctcttccttcccagccgtttccaaggagaagttagctgagtgtgacaacattggtgaatacatcaagaagacaatggaattgggtattttacctcgtgatatcctcacaaaagaggcttttgaaaacgccattacttatgtcgttgcaaccggtgggtccactaatgctgttttgcatttggtggctgttgctcactctgcgggtgtcaagttgtcaccagatgatttccaaagaatcagtgatactacaccattgatcggtgacttcaaaccttctggtaaatacgtcatggccgatttgattaacgttggtggtacccaatctgtgattaagtatctatatgaaaacaacatgttgcacggtaacacaatgactgttaccggtgacactttggcagaacgtgcaaagaaagcaccaagcctacctgaaggacaagagattattaagccactctcccacccaatcaaggccaacggtcacttgcaaattctgtacggttcattggcaccaggtggagctgtgggtaaaattaccggtaaggaaggtacttacttcaagggtagagcacgtgtgttcgaagaggaaggtgcctttattgaagccttggaaagaggtgaaatcaagaagggtgaaaaaaccgttgttgttatcagatatgaaggtccaagaggtgcaccaggtatgcctgaaatgctaaagccttcctctgctctgatgggttacggtttgggtaaagatgttgcattgttgactgatggtagattctctggtggttctcacgggttcttaatcggccacattgttcccgaagccgctgaaggtggtcctatcgggttggtcagagacggcgatgagattatcattgatgctgataataacaagattgacctattagtctctgataaggaaatggctcaacgtaaacaaagttgggttgcacctccacctcgttacacaagaggtactctatccaagtatgctaagttggtttccaacgcttccaacggttgtgttttagatgcttga

SEQ ID NO: 59 - protein, 566 aa, Saccharomyces cerevisiae
MKKLNKYSYIITEPKGQGASQAMLYATGFKKEDFKKPQVGVGSCWWSGNPCNMHLLDLNNRCSQSIEKAGLKAMQFNTIGVSDGISMGTKGMRYSLQSREIIADSFETIMMAQHYDANIAIPSCDKNMPGVMMAMGRHNRPSIMVYGGTILPGHPTCGSSKISKNIDIVSAFQSYGEYISKQFTEEEREDVVEHACPGPGSCGGMYTANTMASAAEVLGLTIPNSSSFPAVSKEKLAECDNIGEYIKKTMELGILPRDILTKEAFENAITYVVATGGSTNAVLHLVAVAHSAGVKLSPDDFQRISDTTPLIGDFKPSGKYVMADLINVGGTQSVIKYLYENNMLHGNTMTVTGDTLAERAKKAPSLPEGQEIIKPLSHPIKANGHLQILYGSLAPGGAVGKITGKEGTYFKGRARVFEEEGAFIEALERGEIKKGEKTVVVIRYEGPRGAPGMPEMLKPSSALMGYGLGKDVALLTDGRFSGGSHGFLIGHIVPEAAEGGPIGLVRDGDEIIIDADNNKIDLLVSDKEMAQRKQSWVAPPPRYTRGTLSKYAKLVSNASNGCVLDA

SEQ ID NO: 60 - DNA, 771 bp, Drosophila melanogaster
atgtcgtttactttgaccaacaagaacgtgattttcgttgccggtctgggaggcattggtctggacaccagcaaggagctgctcaagcgcgatctgaagaacctggtgatcctcgaccgcattgagaacccggctgccattgccgagctgaaggcaatcaatccaaaggtgaccgtcaccttctacccctatgatgtgaccgtgcccattgccgagaccaccaagctgctgaagaccatcttcgcccagctgaagaccgtcgatgtcctgatcaacggagctggtatcctggacgatcaccagatcgagcgcaccattgccgtcaactacactggcctggtcaacaccacgacggccattctggacttctgggacaagcgcaagggcggtcccggtggtatcatctgcaacattggatccgtcactggattcaatgccatctaccaggtgcccgtctactccggcaccaaggccgccgtggtcaacttcaccagctccctggcgaaactggcccccattaccggcgtgacggcttacactgtgaaccccggcatcacccgcaccaccctggtgcacacgttcaactcctggttggatgttgagcctcaggttgccgagaagctcctggctcatcccacccagccctcgttggcctgcgccgagaacttcgtcaaggctatcgagctgaaccagaacggagccatctggaaactggacttgggcaccctggaggccatccagtggaccaagcactgggactccggcatctaa

SEQ ID NO: 61 - protein, 256 aa, Drosophila melanogaster
MSFTLTNKNVIFVAGLGGIGLDTSKELLKRDLKNLVILDRIENPAAIAELKAINPKVTVTFYPYDVTVPIAETTKLLKTIFAQLKTVDVLINGAGILDDHQIERTIAVNYTGLVNTTTAILDFWDKRKGGPGGIICNIGSVTGFNAIYQVPVYSGTKAAVVNFTSSLAKLAPITGVTAYTVNPGITRTTLVHTFNSWLDVEPQVAEKLLAHPTQPSLACAENFVKAIELNQNGAIWKLDLGTLEAIQWTKHWDSGI

SEQ ID NO: 62 - DNA, 1164 bp, Klebsiella pneumoniae
atgagctaccgtatgtttgactatctggtccctaacgtgaacttcttcggcccgaatgcaatctctgtggttggcgaacgttgccaactgctgggtggtaaaaaggcgctgctggtgacggataaaggtctgcgtgcaattaaagacggtgccgttgataaaaccctgcactatctgcgtgaggccggcattgaggttgccatcttcgatggtgtagaaccgaacccgaaagatacgaacgtgcgcgacggtctggctgttttccgtcgtgaacaatgtgacattatcgttaccgtgggtggtggctctccgcatgattgcggtaaaggcatcggtatcgcggctacccacgaaggtgatctgtaccagtatgcgggcatcgagactctgaccaacccgctgccgccgatcgttgctgtaaacaccacggccggcaccgcctccgaagttacccgtcattgtgtgctgactaacaccgagacgaaagtgaaattcgttattgtgtcctggcgcaatctgcctagcgtaagcattaacgatccgctgctgatgatcggcaaaccagcggcactgaccgctgcaactggtatggacgccctgactcacgcagtcgaagcatatatctccaaagatgctaacccggtaaccgacgcggcagctatgcaggcgattcgtctgattgcccgtaacctgcgtcaggcagtggctctgggcagcaacctgcaggctcgtgagaacatggcctacgcgagcctgctggccggcatggcattcaacaacgctaacctgggttacgttcatgcgatggctcatcagctgggcggcctgtacgacatgccgcacggtgtagctaacgcagttctgctgccacatgttgctcgttataacctgatcgctaatccggaaaaattcgcagacatcgcagaactgatgggcgagaacatcacgggtctgagcactctggatgccgcggaaaaagcgatcgcagcgattacgcgtctgtctatggacattggtattccgcaacacctgcgtgacctgggtgtaaaagaagctgatttcccttacatggcggaaatggcactgaaagatggtaatgcgttttccaacccacgtaaaggtaacgaacaggagattgcggctattttccgtcaagcattctga

SEQ ID NO: 63 - protein, 387 aa, Klebsiella pneumoniae
MSYRMFDYLVPNVNFFGPNAISVVGERCQLLGGKKALLVTDKGLRAIKDGAVDKTLHYLREAGIEVAIFDGVEPNPKDTNVRDGLAVFRREQCDIIVTVGGGSPHDCGKGIGIAATHEGDLYQYAGIETLTNPLPPIVAVNTTAGTASEVTRHCVLTNTETKVKFVIVSWRNLPSVSINDPLLMIGKPAALTAATGMDALTHAVEAYISKDANPVTDAAAMQAIRLIARNLRQAVALGSNLQARENMAYASLLAGMAFNNANLGYVHAMAHQLGGLYDMPHGVANAVLLPHVARYNLIANPEKFADIAELMGENITGLSTLDAAEKAIAAITRLSMDIGIPQHLRDLGVKEADFPYMAEMALKDGNAFSNPRKGNEQEIAAIFRQAF

SEQ ID NO: 64 - DNA, 1152 bp, Escherichia coli
atgatggctaacagaatgattctgaacgaaacggcatggtttggtcggggtgctgttggggctttaaccgatgaggtgaaacgccgtggttatcagaaggcgctgatcgtcaccgataaaacgctggtgcaatgcggcgtggtggcgaaagtgaccgataagatggatgctgcagggctggcatgggcgatttacgacggcgtagtgcccaacccaacaattactgtcgtcaaagaagggctcggtgtattccagaatagcggcgcggattacctgatcgctattggtggtggttctccacaggatacttgtaaagcgattggcattatcagcaacaacccggagtttgccgatgtgcgtagcctggaagggctttccccgaccaataaacccagtgtaccgattctggcaattcctaccacagcaggtactgcggcagaagtgaccattaactacgtgatcactgacgaagagaaacggcgcaagtttgtttgcgttgatccgcatgatatcccgcaggtggcgtttattgacgctgacatgatggatggtatgcctccagcgctgaaagctgcgacgggtgtcgatgcgctcactcatgctattgaggggtatattacccgtggcgcgtgggcgctaaccgatgcactgcacattaaagcgattgaaatcattgctggggcgctgcgaggatcggttgctggtgataaggatgccggagaagaaatggcgctcgggcagtatgttgcgggtatgggcttctcgaatgttgggttagggttggtgcatggtatggcgcatccactgggcgcgttttataacactccacacggtgttgcgaacgccatcctgttaccgcatgtcatgcgttataacgctgactttaccggtgagaagtaccgcgatatcgcgcgcgttatgggcgtgaaagtggaaggtatgagcctggaagaggcgcgtaatgccgctgttgaagcggtgtttgctctcaaccgtgatgtcggtattccgccacatttgcgtgatgttggtgtacgcaaggaagacattccggcactggcgcaggcggcactggatgatgtttgtaccggtggcaacccgcgtgaagcaacgcttgaggatattgtagagctttaccataccgcctggtaa

SEQ ID NO: 65 - protein, 383 aa, Escherichia coli
MMANRMILNETAWFGRGAVGALTDEVKRRGYQKALIVTDKTLVQCGVVAKVTDKMDAAGLAWAIYDGVVPNPTITVVKEGLGVFQNSGADYLIAIGGGSPQDTCKAIGIISNNPEFADVRSLEGLSPTNKPSVPILAIPTTAGTAAEVTINYVITDEEKRRKFVCVDPHDIPQVAFIDADMMDGMPPALKAATGVDALTHAIEGYITRGAWALTDALHIKAIEIIAGALRGSVAGDKDAGEEMALGQYVAGMGFSNVGLGLVHGMAHPLGAFYNTPHGVANAILLPHVMRYNADFTGEKYRDIARVMGVKVEGMSLEEARNAAVEAVFALNRDVGIPPHLRDVGVRKEDIPALAQAALDDVCTGGNPREATLEDIVELYHTAW

SEQ ID NO: 66 - DNA, 1023 bp, Lactococcus lactis
atgaaagcagcagtagtaagacacaatccagatggttatgcggaccttgttgaaaaggaacttcgagcaatcaaacctaatgaagctttgcttgacatggagtattgtggagtctgtcataccgatttgcacgttgcagcaggtgattatggcaacaaagcagggactgttcttggtcatgaaggaattggaattgtcaaagaaattggagctgatgtaagctcgcttcaagttggtgatcgggtttcagtggcttggttctttgaaggatgtggtcactgtgaatactgtgtatctggtaatgaaactttttgtcgagaagttaaaaatgcaggatattcagttgatggcggaatggctgaagaagcaattgttgttgccgattatgctgtcaaagttcctgacggacttgacccaattgaagctagctcaattacttgtgctggagtaacaacttacaaagcaatcaaagtatcaggagtaaaacctggtgattggcaagtaatttttggtgctggaggacttggaaatttagcaattcaatatgctaaaaatgtttttggagcaaaagtaattgctgttgatattaatcaagataaattaaatttagctaaaaaaattggagctgatgtgattatcaattctggtgatgtaaatccagttgatgaaattaaaaaaataactggcggcttaggggtgcaaagtgcaatagtttgtgctgttgcaaggattgcttttgaacaagcggttgcttctttgaaacctatgggcaaaatggttgctgtggcacttcccaatactgagatgactttatcagttccaacagttgtttttgacggagtggaggttgcaggttcacttgtcggaacaagacttgacttggcagaagcttttcaatttggagcagaaggtaaggtaaaaccaattgttgcgacacgcaaactggaagaaatcaatgatattattgatgaaatgaaggcaggaaaaattgaaggccgaatggtcattgattttactaaataa

SEQ ID NO: 67 - protein, 340 aa, Lactococcus lactis
MKAAVVRHNPDGYADLVEKELRAIKPNEALLDMEYCGVCHTDLHVAAGDYGNKAGTVLGHEGIGIVKEIGADVSSLQVGDRVSVAWFFEGCGHCEYCVSGNETFCREVKNAGYSVDGGMAEEAIVVADYAVKVPDGLDPIEASSITCAGVTTYKAIKVSGVKPGDWQVIFGAGGLGNLAIQYAKNVFGAKVIAVDINQDKLNLAKKIGADVIINSGDVNPVDEIKKITGGLGVQSAIVCAVARIAFEQAVASLKPMGKMVAVALPNTEMTLSVPTVVFDGVEVAGSLVGTRLDLAEAFQFGAEGKVKPIVATRKLEEINDIIDEMKAGKIEGRMVIDFTK

SEQ ID NO: 68 - DNA, 1164 bp, Escherichia coli
atgaacaactttaatctgcacaccccaacccgcattctgtttggtaaaggcgcaatcgctggtttacgcgaacaaattcctcacgatgctcgcgtattgattacctacggcggcggcagcgtgaaaaaaaccggcgttctcgatcaagttctggatgccctgaaaggcatggacgtgctggaatttggcggtattgagccaaacccggcttatgaaacgctgatgaacgccgtgaaactggttcgcgaacagaaagtgactttcctgctggcggttggcggcggttctgtactggacggcaccaaatttatcgccgcagcggctaactatccggaaaatatcgatccgtggcacattctgcaaacgggcggtaaagagattaaaagcgccatcccgatgggctgtgtgctgacgctgccagcaaccggttcagaatccaacgcaggcgcggtgatctcccgtaaaaccacaggcgacaagcaggcgttccattctgcccatgttcagccggtatttgccgtgctcgatccggtttatacctacaccctgccgccgcgtcaggtggctaacggcgtagtggacgcctttgtacacaccgtggaacagtatgttaccaaaccggttgatgccaaaattcaggaccgtttcgcagaaggcattttgctgacgctaatcgaagatggtccgaaagccctgaaagagccagaaaactacgatgtgcgcgccaacgtcatgtgggcggcgactcaggcgctgaacggtttgattggcgctggcgtaccgcaggactgggcaacgcatatgctgggccacgaactgactgcgatgcacggtctggatcacgcgcaaacactggctatcgtcctgcctgcactgtggaatgaaaaacgcgataccaagcgcgctaagctgctgcaatatgctgaacgcgtctggaacatcactgaaggttccgatgatgagcgtattgacgccgcgattgccgcaacccgcaatttctttgagcaattaggcgtgccgacccacctctccgactacggtctggacggcagctccatcccggctttgctgaaaaaactggaagagcacggcatgacccaactgggcgaaaatcatgacattacgttggatgtcagccgccgtatatacgaagccgcccgctaa

SEQ ID NO: 69 - protein, 387 aa, Escherichia coli
MNNFNLHTPTRILFGKGAIAGLREQIPHDARVLITYGGGSVKKTGVLDQVLDALKGMDVLEFGGIEPNPAYETLMNAVKLVREQKVTFLLAVGGGSVLDGTKFIAAAANYPENIDPWHILQTGGKEIKSAIPMGCVLTLPATGSESNAGAVISRKTTGDKQAFHSAHVQPVFAVLDPVYTYTLPPRQVANGVVDAFVHTVEQYVTKPVDAKIQDRFAEGILLTLIEDGPKALKEPENYDVRANVMWAATQALNGLIGAGVPQDWATHMLGHELTAMHGLDHAQTLAIVLPALWNEKRDTKRAKLLQYAERVWNITEGSDDERIDAAIAATRNFFEQLGVPTHLSDYGLDGSSIPALLKKLEEHGMTQLGENHDITLDVSRRIYEAAR

SEQ ID NO: 70 - protein, 395 aa, Saccharomyces cerevisiae
MLRTQAARLICNSRVITAKRTFALATRAAAYSRPAARFVKPMITTRGLKQINFGGTVETVYERADWPREKLLDYFKNDTFALIGYGSQGYGQGLNLRDNGLNVIIGVRKDGASWKAAIEDGWVPGKNLFTVEDAIKRGSYVMNLLSDAAQSETWPAIKPLLTKGKTLYFSHGFSPVFKDLTHVEPPKDLDVILVAPKGSGRTVRSLFKEGRGINSSYAVWNDVTGKAHEKAQALAVAIGSGYVYQTTFEREVNSDLYGERGCLMGGIHGMFLAQYDVLRENGHSPSEAFNETVEEATQSLYPLIGKYGMDYMYDACSTTARRGALDWYPIFKNALKPVFQDLYESTKNGTETKRSLEFNSQPDYREKLEKELDTIRNMEIWKVGKEVRKLRPENQ

SEQ ID NO: 71 - protein, 330 aa, Methanococcus maripaludis
MKVFYDSDFKLDALKEKTIAVIGYGSQGRAQSLNMKDSGLNVVVGLRKNGASWENAKADGHNVMTIEEAAEKADIIHILIPDELQAEVYESQIKPYLKEGKTLSFSHGFNIHYGFIVPPKGVNVVLVAPKSPGKMVRRTYEEGFGVPGLICIEIDATNNAFDIVSAMAKGIGLSRAGVIQTTFKEETETDLFGEQAVLCGGVTELIKAGFETLVEAGYAPEMAYFETCHELKLIVDLIYQKGFKNMWNDVSNTAEYGGLTRRSRIVTADSKAAMKEILKEIQDGRFTKEFVLEKQVNHAHLKAMRRIEGDLQIEEVGAKLRKMCGLEKEE

SEQ ID NO: 72 - protein, 342 aa, Bacillus subtilis
MVKVYYNGDIKENVLAGKTVAVIGYGSQGHAHALNLKESGVDVIVGVRQGKSFTQAQEDGHKVFSVKEAAAQAEIIMVLLPDEQQQKVYEAEIKDELTAGKSLVFAHGFNVHFHQIVPPADVDVFLVAPKGPGHLVRRTYEQGAGVPALFAIYQDVTGEARDKALAYAKGIGGARAGVLETTFKEETETDLFGEQAVLCGGLSALVKAGFETLTEAGYQPELAYFECLHELKLIVDLMYEEGLAGMRYSISDTAQWGDFVSGPRVVDAKVKESMKEVLKDIQNGTFAKEWIVENQVNRPRFNAINASENEHQIEVVGRKLREMMPFVKQGKKKEAVVSVAQN

SEQ ID NO: 73 - protein, 352 aa, Piromyces sp.
MVKVINFGGVDETVYERADFPQEKLNEIFKDDVFVVIGYGTQGRNQSRNLRDKGFKVIVGLRKGPSWDLAKEDGWVESESLFEITEACQKGTIIMYLLSDAGQKACWNTIKELVHGKTLYFSHGFSIVFKEKTGVVPPEDCDVIMVAPKGSGTTVRTLFLEGRGINSSVAVFQNWSGKAEERAYAAGIAIGSGYLYPTTFERETYSDLTGERGTLMGCIQGCFKAQFEVLIANGHTPSEAFSETVEEATQSLYPLIGKDGMDWMYDNCSTTARRGALDWMDKFYAATKPVFEELYESVRNGTEAENTLVANSKPDYRENLAKELKELRESQMWQTAVTVRSLRPENQKVEKN

SEQ ID NO: 74 - protein, 490 aa, Buchnera aphidicola
MKNYFNSLNFRQKLINLQKCKLIDNQFLSEKNNVLKGKNIVIVGCGSQGLNQGLNMRDSGLNISYALRDDSIFNKNQSWINATSNGFFVGTYENIIPTADLVINLTPDKQHEQVVNVLQKFMKPNSVLGFSHGFNIVEVGQLIRNDITVIMVAPKCPGTEVREEYKRGFGVPALIAVHSENDPHDIGFEIAKSWAISIGSHHAGILHSSFIAEVKSDLMGEQTILCGMLQASSLVCYNQLIFQGVNPSYAGKLIQTGWEVITESVKHGGITLMLDRLSNTAKIRAYFLSKKLKKIFFPLFRKHMDDIISGEFSKNMMFDWKNNDQQLKEWRTEIQNTDFEKCNIYYKQIPEQEYFDNGLLMVAILKAGIELSFEIMIETGIKEESAYYESLHELPLIANTIARKRLYEMNLVISDTAEYGSYLFSHAAIPLLKKFMNELQPGDLGNKISTSELDNITLYKVNAKIESHPIEIIGKKLRLYMTSMVPIKTK

SEQ ID NO: 75 - protein, 595 aa, Spinacia oleracea
MAATAATTFSLSSSSSTSAAASKALKQSPKPSALNLGFLGSSSTIKACRSLKAARVLPSGANGGGSALSAQMVSAPSINTPSATTFDFDSSVFKKEKVTLSGHDEYIVRGGRNLFPLLPDAFKGIKQIGVIGWGSQAPAQAQNLKDSLTEAKSDVVVKIGLRKGSNSFAEARAAGFSEENGTLGDMWETISGSDLVLLLISDSAQADNYEKVFSHMKPNSILGLSHGFLLGHLQSLGQDFPKNISVIAVCPKGMGPSVRRLYVQGKEVNGAGINSSFAVHQDVDGRATDVALGWSIALGSPFTFATTLEQEYKSDIFGERGILLGAVHGIVECLFRRYTESGMSEDLAYKNTVECITGVISKTISTKGMLALYNSLSEEGKKDFQAAYSASYYPSMDILYECYEDVASGSEIRSVVLAGRRFYEKEGLPAFPMGKIDQTRMWKVGEKVRSVRPAGDLGPLYPFTAGVYVALMMAQIEILRKKGHSYSEIINESVIEAVDSLNPFMHARGVSFMVDNCSTTARLGSRKWAPRFDYILSQQALVAVDNGAPINQDLISNFLSDPVHEAIGVCAQLRPSVDISVTADADFVRPELRQA

SEQ ID NO: 76 - protein, 578 aa, Oryza sativa
MAASTTLALSHPKTLAAAAAAAPKAPTAPAAVSFPVSHAACAPLAARRRAVTAMVAAPPAVGAAMPSLDFDTSVFNKEKVSLAGHEEYIVRGGRNLFPLLPEAFKGIKQIGVIGWGSQGPAQAQNLRDSLAEAKSDIVVKIGLRKGSKSFDEARAAGFTEESGTLGDIWETVSGSDLVLLLISDAAQADNYEKIFSHMKPNSILGLSHGFLLGHLQSAGLDFPKNISVIAVCPKGMGPSVRRLYVQGKEINGAGINSSFAVHQDVDGRATDVALGWSVALGSPFTFATTLEQEYKSDIFGERGILLGAVHGIVEALFRRYTEQGMDEEMAYKNTVEGITGIISKTISKKGMLEVYNSLTEEGKKEFNKAYSASFYPCMDILYECYEDVASGSEIRSVVLAGRRFYEKEGLPAFPMGNIDQTRMWKVGEKVRSTRPENDLGPLHPFTAGVYVALMMAQIEVLRKKGHSYSEIINESVIESVDSLNPFMHARGVAFMVDNCSTTARLGSRKWAPRFDYILTQQAFVTVDKDAPINQDLISNFMSDPVHGAIEVCAELRPTVDISVPANADFVRPELRQSS

SEQ ID NO: 77 - protein, 555 aa, Chlamydomonas reinhardtii
MQLLNSKSRVLSGSRQQAAAKAVRVAPSGRRSAVRVSAAVHLDFNTKVFQKEHAKFGPTEEYIVRGGRDKYPLLKEAFKGIKKVSVIGWGSQAPAQAQNLRDSIAEAGMDIKVAIGLRPDSPSWAEAEACGFSKTDGTLGEVFEQISSSDFVILLISDAAQAKLYPRILAAMKPGATLGLSHGFLLGVMRNDGVDFRKDINVVLVAPKGMGPSVRRLYEQGKSVNGAGINCSFAIQQDATGQAADIAIGWAIGVGAPFAFPTTLESEYKSDIYGERCVLLGAVHGIVEALFRRYTRQGMSDEEAFKQSVESITGPISRTISTKGMLSVYNSFNEADKKIFEQAYSASYKPALDICFEIYEDVASGNEIKSVVQAVQRFDRFPMGKIDQTYMWKVGQKVRAERDESKIPVNPFTAGVYVAVMMATVEVLREKGHPFSEICNESIIEAVDSLNPYMHARGVAFMVDNCSYTARLGSRKWAPRFDYIIEQQAFVDIDSGKAADKEVMAEFLAHPVHSALATCSSMRPSVDISVGGENSSVGVGAGAARTEFRSTAAKV

SEQ ID NO: 78 - protein, 402 aa, Neurospora crassa
MAARNCTKALRPLARQLATPAVQRRTFVAAASAVRASVAVKAVAAPARQQVRGVKTMDFAGHKEEVHERADWPAEKLLDYFKNDTLALIGYGSQGHGQGLNLRDNGLNVIVGVRKNGKSWEDAIQDGWVPGKNLFDVDEAISRGTIVMNLLSDAAQSETWPHIKPQITKGKTLYFSHGFSPVFKDLTKVEVPTDVDVILVAPKGSGRTVRSLFREGRGINSSFAVYQDVTGKAKEKAVALGVAVGSGYLYETTFEKEVYSDLYGERGCLMGGIHGMFLAQYEVLRERGHSPSEAFNETVEEATQSLYPLIGAHGMDWMFDACSTTARRGAIDWTPKFKDALKPVFNNLYDSVKNGDETKRSLEYNSQPDYRERYEAELDEIRNLEIWRAGKAVRSLRPENQK

SEQ ID NO: 79 - protein, 404 aa, Schizosaccharomyces pombe
MSFRNSSRMAMKALRTMGSRRLATRSMSVMARTIAAPSMRFAPRMTAPLMQTRGMRVMDFAGTKENVWERSDWPREKLVDYFKNDTLAIIGYGSQGHGQGLNARDQGLNVIVGVRKDGASWKQAIEDGWVPGKTLFPVEEAIKKGSIIMNLLSDAAQTETWPKIAPLITKGKTLYFSHGFSVIFKDQTKIHPPKDVDVILVAPKGSGRTVRTLFKEGRGINSSFAVYQDVTGKAQEKAIGLAVAVGSGFIYQTTFKKEVISDLVGERGCLMGGINGLFLAQYQVLRERGHSPAEAFNETVEEATQSLYPLIGKYGLDYMFAACSTTARRGAIDWTPRFLEANKKVLNELYDNVENGNEAKRSLEYNSAPNYRELYDKELEEIRNLEIWKAGEVVRSLRPEHNKH

SEQ ID NO: 80 - protein, 415 aa, Laccaria bicolor
MASLARSASQSLRASARRAPRSLAKSAVRPTQAASYSLFARAAAAKVAQTSTAKGVRGVKTLDFAGTKEVVYERSDWPLAKLQDYFKNDTLALIGYGSQGHGQGLNARDNGLNVIVGVRKDGESWRQALEDGWESFSPVPGETLFPIEEAINKGTIIMNLLSDAAQSQTWPQLAPLITKGKTLYFSHGFSVVYKDDTHVIPPKDVDVILVAPKGSGRTVRTLFKEGRGINSSIAVWQDVTGKAKEKAIALGVGIGSGYMYETTFEKEVYSDLYGERGVLMGGIQGLFLAQYQVLRKNGHSPSEAFNETVEEATQSLYPLIGQKGMDYMYNACSTTARRGALDWAPIFEKANVPVFEALYESVRNGTETRKSLEFNGRATYREDLAKELAVIDNQEIWRAGKTVRSLRPDYKPESE

SEQ ID NO: 81 - protein, 343 aa, Ignicoccus hospitalis
MGLNAGALRRVGVTVAQIWKDSDVSLEPLKGRKVAIIGYGSQGRAWALNIRDSGVDVVVGLRPGGKSWELATKDGFEPKPIPEAAKEGDVIAMLIPDMAQPEIYEKYVEPNLHEGNALVFAHGFNIHYGLIKPPKNVDVIMVAPKSPGPKVREAFLSGRGVPALVAVHQDYTGKAWDLVLALAKALGCTRAGVIKTTFKEETESDLIGEQTVLVGGLMELLKKGFENLVELGYQPEVAYFEAINEAKLIMDLIWQYGFYGMLLRVSDTAKYGGLTVGPKVIDEHVKENMKKASERVISGEFAKEWVEEYKKGMPTLKELMEKVKEHQAEKVGKELRKLMGLEE

SEQ ID NO: 82 - protein, 329 aa, Picrophilus torridus
MEKVYTENDLKENLMRNKKIAVLGYGSQGRAWALNMRDSGLNVTVGLERQGKSWEKAVADGFKPLKSRDAVRDADAVIFLVPDMAQRELYKNIMNDIKDDADIVFAHGFNVHYGLINPKNHDVYMVAPKAPGPSVREFYERGGGVPVLIAVANDVSGRSKEKALSIAYSLGALRAGAIETTFKEETETDLIGEQLDLVGGITELLRSTFNIMVEMGYKPEMAYFEAINEMKLIVDQVFEKGISGMLRAVSDTAKYGGLTTGKYIINDDVRKRMRERAEYIVSGKFAEEWIEEYGEGSKNLESMMLDIDNSLEEQVGKQLREIVLRGRPK

SEQ ID NO: 83 - protein, 339 aa, Acidiphilium cryptum
MRVYYDSDADVNLIKAKKVAVVGYGSQGHAHALNLKESGVKELVVALRKGSAAVAKAEAAGLRVMTPEEAAAWADVVMILTPDEGQGDLYRDSLAANLKPGAAIAFAHGLNIHFNLIEPRADIDVFMIAPKGPGHTVRSEYQRGGGVPCLVAVAQNPSGNALDIALSYASAIGGGRAGIIETTFKEECETDLFGEQTVLCGGLVELIKAGFETLVEAGYAPEMAYFECLHEVKLIVDLIYEGGIANMNYSISNTAEYGEYVTGPRMITPETKAEMKRVLDDIQKGRFTRDWMLENKVNQTNFKAMRRANAAHPIEEVGEKLRAMMPWIKKGALVDKTRN

SEQ ID NO: 84 - protein, 330 aa, Synechococcus sp.
MARLYYDTDANLDLLDGKTVAIIGYGSQGHAHALNLRDSGVNVLVGLYPGSPSWPKAERDGLTVKTVADAAAAADWVMILLPDEVQKTVFQSEIRPHLKPGKVLLFAHGFNIHFGQIQPPPDIDVIMVAPKGPGHLVRRTYLEGQGVPCLFAVYQDASGMARERAMAYAKAIGGTRAGILETSFREETETDLFGEQVVLCGGLTALIKAGFETLVEAGYQPELAYFECLHEVKLIVDLIVEGGLEKMRHSISNTAEYGDYTRGPRIITEQTRAEMKRILSEIQSGQFAREFVLENQAGKPVLTAMRRREAEHPIEKVGKELRAMFSWLKK

SEQ ID NO: 85 - protein, 339 aa, Zymomonas mobilis
MKVYYDSDADLGLIKSKKIAILGYGSQGHAHAQNLRDSGVAEVAIALRPDSASVKKAQDAGFKVLTNAEAAKWADILMILAPDEHQAAIYAEDLKDNLRPGSAIAFAHGLNIHFGLIEPRKDIDVFMIAPKGPGHTVRSEYVRGGGVPCLVAVDQDASGNAHDIALAYASGIGGGRSGVIETTFREEVETDLFGEQAVLCGGLTALITAGFETLTEAGYAPEMAFFECMHEMKLIVDLIYEAGIANMRYSISNTAEYGDIVSGPRVINEESKKAMKAILDDIQSGRFVSKFVLDNRAGQPELKAARKRMAAHPIEQVGARLRKMMPWIASNKLVDKARN

SEQ ID NO: 86 - protein, 359 aa, Bacteroides thetaiotaomicron
MAQVIKTKKQKKMAQLNFGGTVENVVIRDEFPLEKAREVLKNETIAVIGYGVQGPGQALNLRDNGFNVIVGQRQGKTYDKAVADGWVPGETLFGIEEACEKGTIIMCLLSDAAVMSVWPTIKPYLTAGKALYFSHGFAITWSDRTGVVPPADIDVIMVAPKGSGTSLRTMFLEGRGLNSSYAIYQDATGNAMDRTIALGIGIGSGYLFETTFIREATSDLTGERGSLMGAIQGLLLAQYEVLRENGHTPSEAFNETVEELTQSLMPLFAKNGMDWMYANCSTTAQRGALDWMGPFHDAIKPVVEKLYHSVKTGNEAQISIDSNSKPDYREKLEEELKALRESEMWQTAVTVRKLRPENN

SEQ ID NO: 87 - protein, 494 aa, Vibrio fischeri
MSNYFNTLNLREQLDQLGRCRFMDREEFATEADYLKGKKVVIVGCGAQGLNQGLNMRDSGLDVAYALRQAAIDEQRQSYKNAKENGFEVASYETLIPQADLVINLTPDKQHTNVVETVMPLMKEGAALGYSHGFNVVEEGMQIRKDLTVVMVAPKCPGTEVREEYKRGFGVPTLIAVHPENDPKGEGWDIAKAWAAGTGGHRAGCLESSFVAEVKSDLMGEQTILCGMLQAGSIVSYEKMIADGIEPGYAGKLLQYGWETITEALKFGGVTHMMDRLSNPAKVKAFELSEELKELMRPLYNKHMDDIISGEFSRTMMADWANDDVNLFGWREETGQTAFENYPESDVEISEQEYFDNGILLVAMVRAGVELAFEAMTASGIIDESAYYESLHELPLIANTVARKRLYEMNVVISDTAEYGNYLFANVATPLLREKFMPSVETDVIGRGLGEASNQVDNATLIAVNDAIRNHPVEYIGEELRSYMSDMKRIAVGG

SEQ ID NO: 88 - protein, 492 aa, Shewanella sp.
MANYFNSLNLRQQLEQLGQCRFMDRSEFSDGCNYIKDWNIVILGCGAQGLNQGLNMRDSGLNIAYALRPEAIAQKRASWQKATDNGFKVGTFEELIPTADLVLNLTPDKQHSNVVSAVMPLMKQGATLSYSHGFNIVEEGMQIRPDITVVMVAPKCPGTEVREEYKRGFGVPTLIAVHPENDPNGDGLEIAKAYASATGGDRAGVLQSSFIAEVKSDLMGEQTILCGMLQTGAILGYDKMVADGVEPGYAAKLIQQGWETVTEALKHGGITNMMDRLSNPAKIKAFEIAEDLKEILQPLFEKHMDDIISGEFSRTMMQDWANDDANLLRWRAETAETGFENAPVSSEHIDEQTYFDKGIFLVAMIKAGVELAFDTMVSAGIVEESAYYESLHETPLIANTIARKRLYEMNVVISDTAEYGCYLFNHAAVPMLRDYVNAMSPEYLGAGLKDSSNNVDNLQLIAINDAIRHTSVEYIGAELRGYMTDMKSIVGA

SEQ ID NO: 89 - protein, 491 aa, Gramella forsetti
MTNYFNSLSLRDQLAQLGTCRFMELDEFSNEVAVLKDKKIVIVGCGAQGLNQGLNMRDSGLDISYALREGAIKEKRQSWKNATENNFNVGTYEELIPKADLVINLTPDKQHTSVIKAIQPHIKKDAVLSYSHGFNIVEEGTKIREDITVIMVAPKCPGTEVREEYKRGFGVPTLIAVHPENDPHGIGLDWAKAYAYATGGHRAGVLESSFVAEVKSDLMGEQTMLCGVLQTGSILTFDKMVADGVEPNYAAKLIQYGWETITEALKHGGITNMMDRLSNPAKLRANEIAEELKEKMRPLFQKHMDDIISGEFSSRMMRDWANDDKELLTWRAETENTAFEKTEATSEEIKEQEYFDKGVLMVAFVRAGVELAFETMVEAGIIEESAYYESLHETPLIANTIARKKLYEMNRVISDTAEYGCYLFDHAAKPLVKDYVNSLEPEVAGKKFGTDCNGVDNQKLIHVNDDLRSHPVEKVGARLRTAMTAMKKIYA

SEQ ID NO: 90 - protein, 493 aa, Psychromonas ingrhamaii
MANYFNTLSLREKLNQLGQCRFMDRSEFTDGCDALKGKKVVIIGCGAQGLNQGLNMRDSGLDVSYTLRAQAIAEKRQSWKNATENGFVVGTYEELIPEADLLCNLTPDKQHTAVVGAVMPLMKEGATLSYSHGFNIVEEGMQVREDLTVIMCAPKCPGSEVREEYKRGFGVPTLIAVHPANDPQGQGLVWAKAYASATGGDRAGVLMSSFVAEVKSDLMGEQTILCGMLQTGAIIGYEKMVADGIEPGYASKLIQYGWETVTEGMKYGGITNMMDRLSNPAKIKAFDMSLELKEILRPLFNKHMDDIIEGEFSRTMMEDWANDDKNLLQWRAETAETGFEKQPAGDMKIDEQEFYDNGIFLIAMIKAGVELAFDAMTASGIIADSAYYESLHETPLIANTIARKKLYEMNVVISDTAEYGCYLFDHAAKPLLADFVKALDPEMLGKPLTVKNNAVDNARLIEVNEAIRSHPVEIVGKKLRGYMTEMKTIITAS

SEQ ID NO: 91 - protein, 492 aa, Cytophaga hutchinsonii
MANYFNTLSLREKLDQLGVCEFMDRSEFSDGVAALKGKKIVIVGCGAQGLNQGLNLRDSGLDVSYTLRKEAIDSKRQSFLNASENGFKVGTYEELIPTADLVINLTPDKQHTAVVSAVMPLMKKGSTLSYSHGFNIVEEGMQIRKDITVIMVAPKSPGSEVREEYKRGFGVPTLIAVHPENDPEGKGWDYAKAYCVGTGGDRAGVLKSSFVAEVKSDLMGEQTILCGLLQTGSILCFDKMVEKGIDKGYASKLIQYGWEVITESLKHGGISGMMDRLSNPAKIKAFQVSEELKDIMRPLFRKHQDDIISGEFSRIMMEDWANGDKNLLTWRAATGETAFEKTPAGDVKIAEQEYYDNGLLMVAMVRAGVELAFETMTESGIIDESAYYESLHETPLIANTIARKKLFEMNRVISDTAEYGCYLFDHACKPLLANFMKTVDTDIIGKNFNAGKDNGVDNQMLIAVNEVLRSHPIEIVGAELREAMTEMKAIVS

SEQ ID NO: 92-100 - skipped (9 entries)

SEQ ID NO: 101 - DNA, 6362 bp, Artificial Sequence
  Plasmid pGV1102
tcgcgcgtttcggtgatgacggtgaaaacctctgacacatgcagctcccggagacggtcacagcttgtctgtaagcggatgccgggagcagacaagcccgtcagggcgcgtcagcgggtgttggcgggtgtcggggctggcttaactatgcggcatcagagcagattgtactgagagtgcaccataccacagcttttcaattcaattcatcattttttttttattcttttttttgatttcggtttctttgaaatttttttgattcggtaatctccgaacagaaggaagaacgaaggaaggagcacagacttagattggtatatatacgcatatgtagtgttgaagaaacatgaaattgcccagtattcttaacccaactgcacagaacaaaaacctgcaggaaacgaagataaatcatgtcgaaagctacatataaggaacgtgctgctactcatcctagtcctgttgctgccaagctatttaatatcatgcacgaaaagcaaacaaacttgtgtgcttcattggatgttcgtaccaccaaggaattactggagttagttgaagcattaggtcccaaaatttgtttactaaaaacacatgtggatatcttgactgatttttccatggagggcacagttaagccgctaaaggcattatccgccaagtacaattttttactcttcgaagacagaaaatttgctgacattggtaatacagtcaaattgcagtactctgcgggtgtatacagaatagcagaatgggcagacattacgaatgcacacggtgtggtgggcccaggtattgttagcggtttgaagcaggcggcagaagaagtaacaaaggaacctagaggccttttgatgttagcagaattgtcatgcaagggctccctatctactggagaatatactaagggtactgttgacattgcgaagagcgacaaagattttgttatcggctttattgctcaaagagacatgggtggaagagatgaaggttacgattggttgattatgacacccggtgtgggtttagatgacaagggagacgcattgggtcaacagtatagaaccgtggatgatgtggtctctacaggatctgacattattattgttggaagaggactatttgcaaagggaagggatgctaaggtagagggtgaacgttacagaaaagcaggctgggaagcatatttgagaagatgcggccagcaaaactaaaaaactgtattataagtaaatgcatgtatactaaactcacaaattagagcttcaatttaattatatcagttattaccctatgcggtgtgaaataccgcacagatgcgtaaggagaaaataccgcatcaggaaattgtaaacgttaatattttgttaaaattcgcgttaaatttttgttaaatcagctcattttttaaccaataggccgaaatcggcaaaatcccttataaatcaaaagaatagaccgagatagggttgagtgttgttccagtttggaacaagagtccactattaaagaacgtggactccaacgtcaaagggcgaaaaaccgtctatcagggcgatggcccactacgtgaaccatcaccctaatcaagttttttggggtcgaggtgccgtaaagcactaaatcggaaccctaaagggagcccccgatttagagcttgacggggaaagccggcgaacgtggcgagaaaggaagggaagaaagcgaaaggagcgggcgctagggcgctggcaagtgtagcggtcacgctgcgcgtaaccaccacacccgccgcgcttaatgcgccgctacagggcgcgtcgcgccattcgccattcaggctgcgcaactgttgggaagggcgatcggtgcgggcctcttcgctattacgccagctggcgaaagggggatgtgctgcaaggcgattaagttgggtaacgccagggttttcccagtcacgacgttgtaaaacgacggccagtgagcgcgcgtaatacgactcactatagggcgaattgggtaccggccgcaaattaaagccttcgagcgtcccaaaaccttctcaagcaaggttttcagtataatgttacatgcgtacacgcgtctgtacagaaaaaaaagaaaaatttgaaatataaataacgttcttaatactaacataactataaaaaaataaatagggacctagacttcaggttgtctaactccttccttttcggttagagcggatgtggggggagggcgtgaatgtaagcgtgacataactaattacatgactcgagcggccgcggatcccgggaattcgtcgacacccgcatagtcaggaacatcgtatgggtacatgctagttctagaaaacttagattagattgctatgctttctttctaatgagcaagaagtaaaaaaagttgtaatagaacaagaaaaatgaaactgaaacttgagaaattgaagaccgtttattaacttaaatatcaatgggaggtcatcgaaagagaaaaaaatcaaaaaaaaaattttcaagaaaaagaaacgtgataaaaatttttattgcctttttcgacgaagaaaaagaaacgaggcggtctcttttttcttttccaaacctttagtacgggtaattaacgacaccctagaggaagaaagaggggaaatttagtatgctgtgcttgggtgttttgaagtggtacggcgatgcgcggagtccgagaaaatctggaagagtaaaaaaggagtagaaacattttgaagctatgagctccagcttttgttccctttagtgagggttaattgcgcgcttggcgtaatcatggtcatagctgtttcctgtgtgaaattgttatccgctcacaattccacacaacataggagccggaagcataaagtgtaaagcctggggtgcctaatgagtgaggtaactcacattaattgcgttgcgctcactgcccgctttccagtcgggaaacctgtcgtgccagctgcattaatgaatcggccaacgcgcggggagaggcggtttgcgtattgggcgctcttccgcttcctcgctcactgactcgctgcgctcggtcgttcggctgcggcgagcggtatcagctcactcaaaggcggtaatacggttatccacagaatcaggggataacgcaggaaagaacatgtgagcaaaaggccagcaaaaggccaggaaccgtaaaaaggccgcgttgctggcgtttttccataggctccgcccccctgacgagcatcacaaaaatcgacgctcaagtcagaggtggcgaaacccgacaggactataaagataccaggcgtttccccctggaagctccctcgtgcgctctcctgttccgaccctgccgcttaccggatacctgtccgcctttctcccttcgggaagcgtggcgctttctcatagctcacgctgtaggtatctcagttcggtgtaggtcgttcgctccaagctgggctgtgtgcacgaaccccccgttcagcccgaccgctgcgccttatccggtaactatcgtcttgagtccaacccggtaagacacgacttatcgccactggcagcagccactggtaacaggattagcagagcgaggtatgtaggcggtgctacagagttcttgaagtggtggcctaactacggctacactagaaggacagtatttggtatctgcgctctgctgaagccagttaccttcggaaaaagagttggtagctcttgatccggcaaacaaaccaccgctggtagcggtggtttttttgtttgcaagcagcagattacgcgcagaaaaaaaggatctcaagaagatcctttgatcttttctacggggtctgacgctcagtggaacgaaaactcacgttaagggattttggtcatgagattatcaaaaaggatcttcacctagatccttttaaattaaaaatgaagttttaaatcaatctaaagtatatatgagtaaacttggtctgacagttaccaatgcttaatcagtgaggcacctatctcagcgatctgtctatttcgttcatccatagttgcctgactccccgtcgtgtagataactacgatacgggagggcttaccatctggccccagtgctgcaatgataccgcgagacccacgctcaccggctccagatttatcagcaataaaccagccagccggaagggccgagcgcagaagtggtcctgcaactttatccgcctccatccagtctattaattgttgccgggaagctagagtaagtagttcgccagttaatagtttgcgcaacgttgttgccattgctacaggcatcgtggtgtcacgctcgtcgtttggtatggcttcattcagctccggttcccaacgatcaaggcgagttacatgatcccccatgttgtgcaaaaaagcggttagctccttcggtcctccgatcgttgtcagaagtaagttggccgcagtgttatcactcatggttatggcagcactgcataattctcttactgtcatgccatccgtaagatgcttttctgtgactggtgagtactcaaccaagtcattctgagaatagtgtatgcggcgaccgagttgctcttgcccggcgtcaatacgggataataccgcgccacatagcagaactttaaaagtgctcatcattggaaaacgttcttcggggcgaaaactctcaaggatcttaccgctgttgagatccagttcgatgtaacccactcgtgcacccaactgatcttcagcatcttttactttcaccagcgtttctgggtgagcaaaaacaggaaggcaaaatgccgcaaaaaagggaataagggcgacacggaaatgttgaatactcatactcttcctttttcaatattattgaagcatttatcagggttattgtctcatgagcggatacatatttgaatgtatttagaaaaataaacaaataggggttccgcgcacatttccccgaaaagtgccacctgaacgaagcatctgtgcttcattttgtagaacaaaaatgcaacgcgagagcgctaatttttcaaacaaagaatctgagctgcatttttacagaacagaaatgcaacgcgaaagcgctattttaccaacgaagaatctgtgcttcatttttgtaaaacaaaaatgcaacgcgagagcgctaatttttcaaacaaagaatctgagctgcatttttacagaacagaaatgcaacgcgagagcgctattttaccaacaaagaatctatacttcttttttgttctacaaaaatgcatcccgagagcgctatttttctaacaaagcatcttagattactttttttctcctttgtgcgctctataatgcagtctcttgataactttttgcactgtaggtccgttaaggttagaagaaggctactttggtgtctattttctcttccataaaaaaagcctgactccacttcccgcgtttactgattactagcgaagctgcgggtgcattttttcaagataaaggcatccccgattatattctataccgatgtggattgcgcatactttgtgaacagaaagtgatagcgttgatgattcttcattggtcagaaaattatgaacggtttcttctattttgtctctatatactacgtataggaaatgtttacattttcgtattgttttcgattcactctatgaatagttcttactacaatttttttgtctaaagagtaatactagagataaacataaaaaatgtagaggtcgagtttagatgcaagttcaaggagcgaaaggtggatgggtaggttatatagggatatagcacagagatatatagcaaagagatacttttgagcaatgtttgtggaagcggtattcgcaatattttagtagctcgttacagtccggtgcgtttttggttttttgaaagtgcgtcttcagagcgcttttggttttcaaaagcgctctgaagttcctatactttctagagaataggaacttcggaataggaacttcaaagcgtttccgaaaacgagcgcttccgaaaatgcaacgcgagctgcgcacatacagctcactgttcacgtcgcacctatatctgcgtgttgcctgtatatatatatacatgagaagaacggcatagtgcgtgtttatgcttaaatgcgtacttatatgcgtctatttatgtaggatgaaaggtagtctagtacctcctgtgatattatcccattccatgcggggtatcgtatgcttccttcagcactaccctttagctgttctatatgctgccactcctcaattggattagtctcatccttcaatgctatcatttcctttgatattggatcatactaagaaaccattattatcatgacattaacctataaaaataggcgtatcacgaggccctttcgtc

SEQ ID NO: 102 - DNA, 7314 bp, Artificial Sequence
  Plasmid pGV1323
tcgcgcgtttcggtgatgacggtgaaaacctctgacacatgcagctcccggagacggtcacagcttgtctgtaagcggatgccgggagcagacaagcccgtcagggcgcgtcagcgggtgttggcgggtgtcggggctggcttaactatgcggcatcagagcagattgtactgagagtgcaccataaacgacattactatatatataatataggaagcatttaatagacagcatcgtaatatatgtgtactttgcagttatgacgccagatggcagtagtggaagatattctttattgaaaaatagcttgtcaccttacgtacaatcttgatccggagcttttctttttttgccgattaagaattaattcggtcgaaaaaagaaaaggagagggccaagagggagggcattggtgactattgagcacgtgagtatacgtgattaagcacacaaaggcagcttggagtatgtctgttattaatttcacaggtagttctggtccattggtgaaagtttgcggcttgcagagcacagaggccgcagaatgtgctctagattccgatgctgacttgctgggtattatatgtgtgcccaatagaaagagaacaattgacccggttattgcaaggaaaatttcaagtcttgtaaaagcatataaaaatagttcaggcactccgaaatacttggttggcgtgtttcgtaatcaacctaaggaggatgttttggctctggtcaatgattacggcattgatatcgtccaactgcatggagatgagtcgtggcaagaataccaagagttcctcggtttgccagttattaaaagactcgtatttccaaaagactgcaacatactactcagtgcagcttcacagaaacctcattcgtttattcccttgtttgattcagaagcaggtgggacaggtgaacttttggattggaactcgatttctgactgggttggaaggcaagagagccccgaaagcttacattttatgttagctggtggactgacgccagaaaatgttggtgatgcgcttagattaaatggcgttattggtgttgatgtaagcggaggtgtggagacaaatggtgtaaaagactctaacaaaatagcaaatttcgtcaaaaatgctaagaaataggttattactgagtagtatttatttaagtattgtttgtgcacttgcctatgcggtgtgaaataccgcacagatgcgtaaggagaaaataccgcatcaggaaattgtaaacgttaatattttgttaaaattcgcgttaaatttttgttaaatcagctcattttttaaccaataggccgaaatcggcaaaatcccttataaatcaaaagaatagaccgagatagggttgagtgttgttccagtttggaacaagagtccactattaaagaacgtggactccaacgtcaaagggcgaaaaaccgtctatcagggcgatggcccactacgtgaaccatcaccctaatcaagttttttggggtcgaggtgccgtaaagcactaaatcggaaccctaaagggagcccccgatttagagcttgacggggaaagccggcgaacgtggcgagaaaggaagggaagaaagcgaaaggagcgggcgctagggcgctggcaagtgtagcggtcacgctgcgcgtaaccaccacacccgccgcgcttaatgcgccgctacagggcgcgtcgcgccattcgccattcaggctgcgcaactgttgggaagggcgatcggtgcgggcctcttcgctattacgccagctggcgaaagggggatgtgctgcaaggcgattaagttgggtaacgccagggttttcccagtcacgacgttgtaaaacgacggccagtgagcgcgcgtaatacgactcactatagggcgaattgggtaccggccgcaaattaaagccttcgagcgtcccaaaaccttctcaagcaaggttttcagtataatgttacatgcgtacacgcgtctgtacagaaaaaaaagaaaaatttgaaatataaataacgttcttaatactaacataactataaaaaaataaatagggacctagacttcaggttgtctaactccttccttttcggttagagcggatgtggggggagggcgtgaatgtaagcgtgacataactaattacatgactcgagcggccgcggatccttaaacaccagcttcgaagtccttttgagccatgaaaatggataaatcaaccactcttgaagagtaaccatattcattatcataccaagaaaggaccttgaaaaaatggtcgttcaattcaataccggccttggcatcaacaatagatgaacgtgaatcggatgtgaagtcagaggacacaacggcgtctttggtaacacccaaaacacccttcatatcgctgcgagatctttgttctagggccttcataatgtcatcgtaagaagttttctttgctgtacggaatgtcaagtcaaccagggaaatattaattgttgggactcttatagacataccggtgatcttaccattaagttcaggcaagattttccctacagccttagctgcaccagtagatgaaggaatgatatttccctggcaagatctaccgcctctccagtccttaccaccagaactggtaccatcgacagtcttttgagaagcagtagttgcatgaatagttgtcatcaaggcttcttcgataccgaactcatcgtccaaagccttaaccaacggagccaaacagttggtagtacaggaggcattagagaccacgtgatccgtcaatgggttgtatttaacgtggttaacaccatagacgtacattggcgcggtctttgatggagcagtaatgataacttttttgacacctttatgtctagaggctgtatcgacttccttgaagacaccggttgagtcaattacataatcgacgttgtaggaagcccatgggatacgctctggttccctaaaatgagatagagggatatgagccgaaacatggtcattttgaatgatgatacgttcatcgtcgaattcaacttcaccacgatacttgccgtgagtagaatcgtatttgaacaaataagcagcgtattctggtgttgtggatggattattgattaatctgaccttaacttctgggtgcgtcaaagcagcacgtagaaccaatctaccgattctaccaaaaccattgataccaatgttaatttgagctggcttagaagaagattcgtttgtcatatcgggcatgtcgacacccgcatagtcaggaacatcgtatgggtacatgctagttctagaaaacttagattagattgctatgctttctttctaatgagcaagaagtaaaaaaagttgtaatagaacaagaaaaatgaaactgaaacttgagaaattgaagaccgtttattaacttaaatatcaatgggaggtcatcgaaagagaaaaaaatcaaaaaaaaaattttcaagaaaaagaaacgtgataaaaatttttattgcctttttcgacgaagaaaaagaaacgaggcggtctcttttttcttttccaaacctttagtacgggtaattaacgacaccctagaggaagaaagaggggaaatttagtatgctgtgcttgggtgttttgaagtggtacggcgatgcgcggagtccgagaaaatctggaagagtaaaaaaggagtagaaacattttgaagctatgagctccagcttttgttccctttagtgagggttaattgcgcgcttggcgtaatcatggtcatagctgtttcctgtgtgaaattgttatccgctcacaattccacacaacataggagccggaagcataaagtgtaaagcctggggtgcctaatgagtgaggtaactcacattaattgcgttgcgctcactgcccgctttccagtcgggaaacctgtcgtgccagctgcattaatgaatcggccaacgcgcggggagaggcggtttgcgtattgggcgctcttccgcttcctcgctcactgactcgctgcgctcggtcgttcggctgcggcgagcggtatcagctcactcaaaggcggtaatacggttatccacagaatcaggggataacgcaggaaagaacatgtgagcaaaaggccagcaaaaggccaggaaccgtaaaaaggccgcgttgctggcgtttttccataggctccgcccccctgacgagcatcacaaaaatcgacgctcaagtcagaggtggcgaaacccgacaggactataaagataccaggcgtttccccctggaagctccctcgtgcgctctcctgttccgaccctgccgcttaccggatacctgtccgcctttctcccttcgggaagcgtggcgctttctcatagctcacgctgtaggtatctcagttcggtgtaggtcgttcgctccaagctgggctgtgtgcacgaaccccccgttcagcccgaccgctgcgccttatccggtaactatcgtcttgagtccaacccggtaagacacgacttatcgccactggcagcagccactggtaacaggattagcagagcgaggtatgtaggcggtgctacagagttcttgaagtggtggcctaactacggctacactagaaggacagtatttggtatctgcgctctgctgaagccagttaccttcggaaaaagagttggtagctcttgatccggcaaacaaaccaccgctggtagcggtggtttttttgtttgcaagcagcagattacgcgcagaaaaaaaggatctcaagaagatcctttgatcttttctacggggtctgacgctcagtggaacgaaaactcacgttaagggattttggtcatgagattatcaaaaaggatcttcacctagatccttttaaattaaaaatgaagttttaaatcaatctaaagtatatatgagtaaacttggtctgacagttaccaatgcttaatcagtgaggcacctatctcagcgatctgtctatttcgttcatccatagttgcctgactccccgtcgtgtagataactacgatacgggagggcttaccatctggccccagtgctgcaatgataccgcgagacccacgctcaccggctccagatttatcagcaataaaccagccagccggaagggccgagcgcagaagtggtcctgcaactttatccgcctccatccagtctattaattgttgccgggaagctagagtaagtagttcgccagttaatagtttgcgcaacgttgttgccattgctacaggcatcgtggtgtcacgctcgtcgtttggtatggcttcattcagctccggttcccaacgatcaaggcgagttacatgatcccccatgttgtgcaaaaaagcggttagctccttcggtcctccgatcgttgtcagaagtaagttggccgcagtgttatcactcatggttatggcagcactgcataattctcttactgtcatgccatccgtaagatgcttttctgtgactggtgagtactcaaccaagtcattctgagaatagtgtatgcggcgaccgagttgctcttgcccggcgtcaatacgggataataccgcgccacatagcagaactttaaaagtgctcatcattggaaaacgttcttcggggcgaaaactctcaaggatcttaccgctgttgagatccagttcgatgtaacccactcgtgcacccaactgatcttcagcatcttttactttcaccagcgtttctgggtgagcaaaaacaggaaggcaaaatgccgcaaaaaagggaataagggcgacacggaaatgttgaatactcatactcttcctttttcaatattattgaagcatttatcagggttattgtctcatgagcggatacatatttgaatgtatttagaaaaataaacaaataggggttccgcgcacatttccccgaaaagtgccacctgaacgaagcatctgtgcttcattttgtagaacaaaaatgcaacgcgagagcgctaatttttcaaacaaagaatctgagctgcatttttacagaacagaaatgcaacgcgaaagcgctattttaccaacgaagaatctgtgcttcatttttgtaaaacaaaaatgcaacgcgagagcgctaatttttcaaacaaagaatctgagctgcatttttacagaacagaaatgcaacgcgagagcgctattttaccaacaaagaatctatacttcttttttgttctacaaaaatgcatcccgagagcgctatttttctaacaaagcatcttagattactttttttctcctttgtgcgctctataatgcagtctcttgataactttttgcactgtaggtccgttaaggttagaagaaggctactttggtgtctattttctcttccataaaaaaagcctgactccacttcccgcgtttactgattactagcgaagctgcgggtgcattttttcaagataaaggcatccccgattatattctataccgatgtggattgcgcatactttgtgaacagaaagtgatagcgttgatgattcttcattggtcagaaaattatgaacggtttcttctattttgtctctatatactacgtataggaaatgtttacattttcgtattgttttcgattcactctatgaatagttcttactacaatttttttgtctaaagagtaatactagagataaacataaaaaatgtagaggtcgagtttagatgcaagttcaaggagcgaaaggtggatgggtaggttatatagggatatagcacagagatatatagcaaagagatacttttgagcaatgtttgtggaagcggtattcgcaatattttagtagctcgttacagtccggtgcgtttttggttttttgaaagtgcgtcttcagagcgcttttggttttcaaaagcgctctgaagttcctatactttctagagaataggaacttcggaataggaacttcaaagcgtttccgaaaacgagcgcttccgaaaatgcaacgcgagctgcgcacatacagctcactgttcacgtcgcacctatatctgcgtgttgcctgtatatatatatacatgagaagaacggcatagtgcgtgtttatgcttaaatgcgtacttatatgcgtctatttatgtaggatgaaaggtagtctagtacctcctgtgatattatcccattccatgcggggtatcgtatgcttccttcagcactaccctttagctgttctatatgctgccactcctcaattggattagtctcatccttcaatgctatcatttcctttgatattggatcatattaagaaaccattattatcatgacattaacctataaaaataggcgtatcacgaggccctttcgtc

SEQ ID NO: 103 - DNA, 6294 bp, Artificial Sequence
  Plasmid pGV1485
taagaaaccattattatcatgacattaacctataaaaataggcgtatcacgaggccctttcgtcttcacctcgagaattgtgagcggataacaattgacattgtgagcggataacaagatactgagcacatcagcaggacgcactgaccgaattcattaaagaggagaaaggtaccatgtatacagtaggagattacctattagaccgattacacgagttaggaattgaagaaatttttggagtccctggagactataacttacaatttttagatcaaattatttcccgcaaggatatgaaatgggtcggaaatgctaatgaattaaatgcttcatatatggctgatggctatgctcgtactaaaaaagctgccgcatttcttacaacctttggagtaggtgaattgagtgcagttaatggattagcaggaagttacgccgaaaatttaccagtagtagaaatagtgggatcacctacatcaaaagttcaaaatgaaggaaaatttgttcatcatacgctggctgacggtgattttaaacactttatgaaaatgcacgaacctgttacagcagctcgaactttactgacagcagaaaatgcaaccgttgaaattgaccgagtactttctgcactattaaaagaaagaaaacctgtctatatcaacttaccagttgatgttgctgctgcaaaagcagagaaaccctcactccctttgaaaaaagaaaactcaacttcaaatacaagtgaccaagagatcttgaacaaaattcaagaaagcttgaaaaatgccaaaaaaccaatcgtgattacaggacatgaaataattagttttggcttagaaaaaacagtctctcaatttatttcaaagacaaaactacctattacgacattaaactttggaaaaagttcagttgatgaagctctcccttcatttttaggaatctataatggtaaactctcagagcctaatcttaaagaattcgtggaatcagccgacttcatcctgatgcttggagttaaactcacagactcttcaacaggagccttcactcatcatttaaatgaaaataaaatgatttcactgaatatagatgaaggaaaaatatttaacgaaagcatccaaaattttgattttgaatccctcatctcctctctcttagacctaagcgaaatagaatacaaaggaaaatatatcgataaaaagcaagaagactttgttccatcaaatgcgcttttatcacaagaccgcctatggcaagcagttgaaaacctaactcaaagcaatgaaacaatcgttgctgaacaagggacatcattctttggcgcttcatcaattttcttaaaaccaaagagtcattttattggtcaacccttatggggatcaattggatatacattcccagcagcattaggaagccaaattgcagataaagaaagcagacaccttttatttattggtgatggttcacttcaacttacggtgcaagaattaggattagcaatcagagaaaaaattaatccaatttgctttattatcaataatgatggttatacagtcgaaagagaaattcatggaccaaatcaaagctacaatgatattccaatgtggaattactcaaaattaccagaatcatttggagcaacagaagaacgagtagtctcgaaaatcgttagaactgaaaatgaatttgtgtctgtcatgaaagaagctcaagcagatccaaatagaatgtactggattgagttaattttggcaaaagaagatgcaccaaaagtactgaaaaaaatgggcaaactatttgctgaacaaaataaatcataagcatgcaggagatataccatgtctattccagaaactcaaaaagccattatcttctacgaatccaacggcaagttggagcataaggatatcccagttccaaagccaaagcccaacgaattgttaatcaacgtcaagtactctggtgtctgccacaccgatttgcacgcttggcatggtgactggccattgccaactaagttaccattagttggtggtcacgaaggtgccggtgtcgttgtcggcatgggtgaaaacgttaagggctggaagatcggtgactacgccggtatcaaatggttgaacggttcttgtatggcctgtgaatactgtgaattgggtaacgaatccaactgtcctcacgctgacttgtctggttacacccacgacggttctttccaagaatacgctaccgctgacgctgttcaagccgctcacattcctcaaggtactgacttggctgaagtcgcgccaatcttgtgtgctggtatcaccgtatacaaggctttgaagtctgccaacttgagagcaggccactgggcggccatttctggtgctgctggtggtctaggttctttggctgttcaatatgctaaggcgatgggttacagagtcttaggtattgatggtggtccaggaaaggaagaattgtttacctcgctcggtggtgaagtattcatcgacttcaccaaagagaaggacattgttagcgcagtcgttaaggctaccaacggcggtgcccacggtatcatcaatgtttccgtttccgaagccgctatcgaagcttctaccagatactgtagggcgaacggtactgttgtcttggttggtttgccagccggtgcaaagtgctcctctgatgtcttcaaccacgttgtcaagtctatctccattgtcggctcttacgtggggaacagagctgataccagagaagccttagatttctttgccagaggtctagtcaagtctccaataaaggtagttggcttatccagtttaccagaaatttacgaaaagatggagaagggccaaattgctggtagatacgttgttgacacttctaaataatctagaggcatcaaataaaacgaaaggctcagtcgaaagactgggcctttcgttttatctgttgtttgtcggtgaacgctctcctgagtaggacaaatccgccgccctagacctagggtacgggttttgctgcccgcaaacgggctgttctggtgttgctagtttgttatcagaatcgcagatccggcttcaggtttgccggctgaaagcgctatttcttccagaattgccatgattttttccccacgggaggcgtcactggctcccgtgttgtcggcagctttgattcgataagcagcatcgcctgtttcaggctgtctatgtgtgactgttgagctgtaacaagttgtctcaggtgttcaatttcatgttctagttgctttgttttactggtttcacctgttctattaggtgttacatgctgttcatctgttacattgtcgatctgttcatggtgaacagctttaaatgcaccaaaaactcgtaaaagctctgatgtatctatcttttttacaccgttttcatctgtgcatatggacagttttccctttgatatctaacggtgaacagttgttctacttttgtttgttagtcttgatgcttcactgatagatacaagagccataagaacctcagatccttccgtatttagccagtatgttctctagtgtggttcgttgtttttgcgtgagccatgagaacgaaccattgagatcatgcttactttgcatgtcactcaaaaattttgcctcaaaactggtgagctgaatttttgcagttaaagcatcgtgtagtgtttttcttagtccgttacgtaggtaggaatctgatgtaatggttgttggtattttgtcaccattcatttttatctggttgttctcaagttcggttacgagatccatttgtctatctagttcaacttggaaaatcaacgtatcagtcgggcggcctcgcttatcaaccaccaatttcatattgctgtaagtgtttaaatctttacttattggtttcaaaacccattggttaagccttttaaactcatggtagttattttcaagcattaacatgaacttaaattcatcaaggctaatctctatatttgccttgtgagttttcttttgtgttagttcttttaataaccactcataaatcctcatagagtatttgttttcaaaagacttaacatgttccagattatattttatgaatttttttaactggaaaagataaggcaatatctcttcactaaaaactaattctaatttttcgcttgagaacttggcatagtttgtccactggaaaatctcaaagcctttaaccaaaggattcctgatttccacagttctcgtcatcagctctctggttgctttagctaatacaccataagcattttccctactgatgttcatcatctgagcgtattggttataagtgaacgataccgtccgttctttccttgtagggttttcaatcgtggggttgagtagtgccacacagcataaaattagcttggtttcatgctccgttaagtcatagcgactaatcgctagttcatttgctttgaaaacaactaattcagacatacatctcaattggtctaggtgattttaatcactataccaattgagatgggctagtcaatgataattactagtccttttcccgggagatctgggtatctgtaaattctgctagacctttgctggaaaacttgtaaattctgctagaccctctgtaaattccgctagacctttgtgtgttttttttgtttatattcaagtggttataatttatagaataaagaaagaataaaaaaagataaaaagaatagatcccagccctgtgtataactcactactttagtcagttccgcagtattacaaaaggatgtcgcaaacgctgtttgctcctctacaaaacagaccttaaaaccctaaaggcttaagtagcaccctcgcaagctcgggcaaatcgctgaatattccttttgtctccgaccatcaggcacctgagtcgctgtctttttcgtgacattcagttcgctgcgctcacggctctggcagtgaatgggggtaaatggcactacaggcgccttttatggattcatgcaaggaaactacccataatacaagaaaagcccgtcacgggcttctcagggcgttttatggcgggtctgctatgtggtgctatctgactttttgctgttcagcagttcctgccctctgattttccagtctgaccacttcggattatcccgtgacaggtcattcagactggctaatgcacccagtaaggcagcggtatcatcaacaggcttacccgtcttactgtccctagtgcttggattctcaccaataaaaaacgcccggcggcaaccgagcgttctgaacaaatccagatggagttctgaggtcattactggatctatcaacaggagtccaagcgagctctcgaaccccagagtcccgctcagaagaactcgtcaagaaggcgatagaaggcgatgcgctgcgaatcgggagcggcgataccgtaaagcacgaggaagcggtcagcccattcgccgccaagctcttcagcaatatcacgggtagccaacgctatgtcctgatagcggtccgccacacccagccggccacagtcgatgaatccagaaaagcggccattttccaccatgatattcggcaagcaggcatcgccatgggtcacgacgagatcctcgccgtcgggcatgcgcgccttgagcctggcgaacagttcggctggcgcgagcccctgatgctcttcgtccagatcatcctgatcgacaagaccggcttccatccgagtacgtgctcgctcgatgcgatgtttcgcttggtggtcgaatgggcaggtagccggatcaagcgtatgcagccgccgcattgcatcagccatgatggatactttctcggcaggagcaaggtgagatgacaggagatcctgccccggcacttcgcccaatagcagccagtcccttcccgcttcagtgacaacgtcgagcacagctgcgcaaggaacgcccgtcgtggccagccacgatagccgcgctgcctcgtcctgcagttcattcagggcaccggacaggtcggtcttgacaaaaagaaccgggcgcccctgcgctgacagccggaacacggcggcatcagagcagccgattgtctgttgtgcccagtcatagccgaatagcctctccacccaagcggccggagaacctgcgtgcaatccatcttgttcaatcatgcgaaacgatcctcatcctgtctcttgatcagatcttgatcccctgcgccatcagatccttggcggcaagaaagccatccagtttactttgcagggcttcccaaccttaccagagggcgccccagctggcaattccgacgtc

SEQ ID NO: 104 - DNA, 1980 bp, Artificial Sequence
  Plasmid pGV1490
ctcgagtccctatcagtgatagagattgacatccctatcagtgatagagatactgagcacatcagcaggacgcactgaccgaattcattaaagaggagaaaggtacctgcacgtcgactccgtcctaggggatatattccgcttcctcgctcactgactcgctacgctcggtcgttcgactgcggcgagcggaaatggcttacgaacggggcggagatttcctggaagatgccaggaagatacttaacagggaagtgagagggccgcggcaaagccgtttttccataggctccgcccccctgacaagcatcacgaaatctgacgctcaaatcagtggtggcgaaacccgacaggactataaagataccaggcgtttccccctggcggctccctcgtgcgctctcctgttcctgcctttcggtttaccggtgtcattccgctgttatggccgcgtttgtctcattccacgcctgacactcagttccgggtaggcagttcgctccaagctggactgtatgcacgaaccccccgttcagtccgaccgctgcgccttatccggtaactatcgtcttgagtccaacccggaaagacatgcaaaagcaccactggcagcagccactggtaattgatttagaggagttagtcttgaagtcatgcgccggttaaggctaaactgaaaggacaagttttggtgactgcgctcctccaagccagttacctcggttcaaagagttggtagctcagagaaccttcgaaaaaccgccctgcaaggcggttttttcgttttcagagcaagagattacgcgcagaccaaaacgatctcaagaagatcatcttattaatcagataaaatatttctagatttcagtgcaatttatctcttcaaatgtagcacctgaagtcagccccatacgatataagttgttactagtgcttggattctcaccaataaaaaacgcccggcggcaaccgagcgttctgaacaaatccagatggagttctgaggtcattactggatctatcaacaggagtccaagcgagctcgatatcaaattacgccccgccctgccactcatcgcagtactgttgtaattcattaagcattctgccgacatggaagccatcacagacggcatgatgaacctgaatcgccagcggcatcagcaccttgtcgccttgcgtataatatttgcccatggtgaaaacgggggcgaagaagttgtccatattggccacgtttaaatcaaaactggtgaaactcacccagggattggctgagacgaaaaacatattctcaataaaccctttagggaaataggccaggttttcaccgtaacacgccacatcttgcgaatatatgtgtagaaactgccggaaatcgtcgtggtattcactccagagcgatgaaaacgtttcagtttgctcatggaaaacggtgtaacaagggtgaacactatcccatatcaccagctcaccgtctttcattgccatacgaaactccggatgagcattcatcaggcgggcaagaatgtgaataaaggccggataaaacttgtgcttatttttctttacggtctttaaaaaggccgtaatatccagctgaacggtctggttataggtacattgagcaactgactgaaatgcctcaaaatgttctttacgatgccattgggatatatcaacggtggtatatccagtgatttttttctccattttagcttccttagctcctgaaaatctcgataactcaaaaaatacgcccggtagtgatcttatttcattatggtgaaagttggaacctcttacgtgccgatcaacgtctcattttcgccagatatcgacgtctaagaaaccattattatcatgacattaacctataaaaataggcgtatcacgaggccctttcgtcttcacgaaaccattattatcatgacattaacctataaaaataggcgtatcacgaggccctttcgtcttcac

SEQ ID NO: 105 - DNA, 2077 bp, Artificial Sequence
  Plasmid pGV1572
ctagtgcttggattctcaccaataaaaaacgcccggcggcaaccgagcgttctgaacaaatccagatggagttctgaggtcattactggatctatcaacaggagtccaagcgagctcgatatcaaattacgccccgccctgccactcatcgcagtactgttgtaattcattaagcattctgccgacatggaagccatcacagacggcatgatgaacctgaatcgccagcggcatcagcaccttgtcgccttgcgtataatatttgcccatggtgaaaacgggggcgaagaagttgtccatattggccacgtttaaatcaaaactggtgaaactcacccagggattggctgagacgaaaaacatattctcaataaaccctttagggaaataggccaggttttcaccgtaacacgccacatcttgcgaatatatgtgtagaaactgccggaaatcgtcgtggtattcactccagagcgatgaaaacgtttcagtttgctcatggaaaacggtgtaacaagggtgaacactatcccatatcaccagctcaccgtctttcattgccatacgaaactccggatgagcattcatcaggcgggcaagaatgtgaataaaggccggataaaacttgtgcttatttttctttacggtctttaaaaaggccgtaatatccagctgaacggtctggttataggtacattgagcaactgactgaaatgcctcaaaatgttctttacgatgccattgggatatatcaacggtggtatatccagtgatttttttctccattttagcttccttagctcctgaaaatctcgataactcaaaaaatacgcccggtagtgatcttatttcattatggtgaaagttggaacctcttacgtgccgatcaacgtctcattttcgccagatatcgacgtctaagaaaccattattatcatgacattaacctataaaaataggcgtatcacgaggccctttcgtcttcacctcgagaaatgtgagcggataacaattgacattgtgagcggataacaagatactgagcacatcagcaggacgcactgaccgggaattcattaaagaggagaaagtcgacattatgcggccgcggatccataaggaggattaattaagacttcccgggtgatcccatggtacgcgtgctagaggcatcaaataaaacgaaaggctcagtcgaaagactgggcctttcgttttatctgttgtttgtcggtgaacgctctcctgagtaggacaaatccgccgccctagacctaggggatatattccgcttcctcgctcactgactcgctacgctcggtcgttcgactgcggcgagcggaaatggcttacgaacggggcggagatttcctggaagatgccaggaagatacttaacagggaagtgagagggccgcggcaaagccgtttttccataggctccgcccccctgacaagcatcacgaaatctgacgctcaaatcagtggtggcgaaacccgacaggactataaagataccaggcgtttccccctggcggctccctcgtgcgctctcctgttcctgcctttcggtttaccggtgtcattccgctgttatggccgcgtttgtctcattccacgcctgacactcagttccgggtaggcagttcgctccaagctggactgtatgcacgaaccccccgttcagtccgaccgctgcgccttatccggtaactatcgtcttgagtccaacccggaaagacatgcaaaagcaccactggcagcagccactggtaattgatttagaggagttagtcttgaagtcatgcgccggttaaggctaaactgaaaggacaagttttggtgactgcgctcctccaagccagttacctcggttcaaagagttggtagctcagagaaccttcgaaaaaccgccctgcaaggcggttttttcgttttcagagcaagagattacgcgcagaccaaaacgatctcaagaagatcatcttattaatcagataaaatatttctagatttcagtgcaatttatctcttcaaatgtagcacctgaagtcagccccatacgatataagttgtta

SEQ ID NO: 106 - DNA, 3135 bp, Artificial Sequence
  Plasmid pGV1573
ctagtgcttggattctcaccaataaaaaacgcccggcggcaaccgagcgttctgaacaaatccagatggagttctgaggtcattactggatctatcaacaggagtccaagcgagctcgatatcaaattacgccccgccctgccactcatcgcagtactgttgtaattcattaagcattctgccgacatggaagccatcacagacggcatgatgaacctgaatcgccagcggcatcagcaccttgtcgccttgcgtataatatttgcccatggtgaaaacgggggcgaagaagttgtccatattggccacgtttaaatcaaaactggtgaaactcacccagggattggctgagacgaaaaacatattctcaataaaccctttagggaaataggccaggttttcaccgtaacacgccacatcttgcgaatatatgtgtagaaactgccggaaatcgtcgtggtattcactccagagcgatgaaaacgtttcagtttgctcatggaaaacggtgtaacaagggtgaacactatcccatatcaccagctcaccgtctttcattgccatacgaaactccggatgagcattcatcaggcgggcaagaatgtgaataaaggccggataaaacttgtgcttatttttctttacggtctttaaaaaggccgtaatatccagctgaacggtctggttataggtacattgagcaactgactgaaatgcctcaaaatgttctttacgatgccattgggatatatcaacggtggtatatccagtgatttttttctccattttagcttccttagctcctgaaaatctcgataactcaaaaaatacgcccggtagtgatcttatttcattatggtgaaagttggaacctcttacgtgccgatcaacgtctcattttcgccagatatcgacgtctaagaaaccattattatcatgacattaacctataaaaataggcgtatcacgaggccctttcgtcttcacctcgagaaatgtgagcggataacaattgacattgtgagcggataacaagatactgagcacatcagcaggacgcactgaccgggaattcattaaagaggagaaagtcgacatgcccgatatgacaaacgaatcttcttctaagccagctcaaattaacattggtatcaatggttttggtagaatcggtagattggttctacgtgctgctttgacgcacccagaagttaaggtcagattaatcaataatccatccacaacaccagaatacgctgcttatttgttcaaatacgattctactcacggcaagtatcgtggtgaagttgaattcgacgatgaacgtatcatcattcaaaatgaccatgtttcggctcatatccctctatctcattttagggaaccagagcgtatcccatgggcttcctacaacgtcgattatgtaattgactcaaccggtgtcttcaaggaagtcgatacagcctctagacataaaggtgtcaaaaaagttatcattactgctccatcaaagaccgcgccaatgtacgtctatggtgttaaccacgttaaatacaacccattgacggatcacgtggtctctaatgcctcctgtactaccaactgtttggctccgttggttaaggctttggacgatgagttcggtatcgaagaagccttgatgacaactattcatgcaactactgcttctcaaaagactgtcgatggtaccagttctggtggtaaggactggagaggcggtagatcttgccagggaaatatcattccttcatctactggtgcagctaaggctgtagggaaaatcttgcctgaacttaatggtaagatcaccggtatgtctataagagtcccaacaattaatatttccctggttgacttgacattccgtacagcaaagaaaacttcttacgatgacattatgaaggccctagaacaaagatctcgcagcgatatgaagggtgttttgggtgttaccaaagacgccgttgtgtcctctgacttcacatccgattcacgttcatctattgttgatgccaaggccggtattgaattgaacgaccattttttcaaggtcctttcttggtatgataatgaatatggttactcttcaagagtggttgatttatccattttcatggctcaaaaggacttcgaagctggtgtttaaggatccataaggaggattaattaagacttcccgggtgatcccatggtacgcgtgctagaggcatcaaataaaacgaaaggctcagtcgaaagactgggcctttcgttttatctgttgtttgtcggtgaacgctctcctgagtaggacaaatccgccgccctagacctaggggatatattccgcttcctcgctcactgactcgctacgctcggtcgttcgactgcggcgagcggaaatggcttacgaacggggcggagatttcctggaagatgccaggaagatacttaacagggaagtgagagggccgcggcaaagccgtttttccataggctccgcccccctgacaagcatcacgaaatctgacgctcaaatcagtggtggcgaaacccgacaggactataaagataccaggcgtttccccctggcggctccctcgtgcgctctcctgttcctgcctttcggtttaccggtgtcattccgctgttatggccgcgtttgtctcattccacgcctgacactcagttccgggtaggcagttcgctccaagctggactgtatgcacgaaccccccgttcagtccgaccgctgcgccttatccggtaactatcgtcttgagtccaacccggaaagacatgcaaaagcaccactggcagcagccactggtaattgatttagaggagttagtcttgaagtcatgcgccggttaaggctaaactgaaaggacaagttttggtgactgcgctcctccaagccagttacctcggttcaaagagttggtagctcagagaaccttcgaaaaaccgccctgcaaggcggttttttcgttttcagagcaagagattacgcgcagaccaaaacgatctcaagaagatcatcttattaatcagataaaatatttctagatttcagtgcaatttatctcttcaaatgtagcacctgaagtcagccccatacgatataagttgtta

SEQ ID NO: 107 - DNA, 3069 bp, Artificial Sequence
  Plasmid pGV1575
ctagtgcttggattctcaccaataaaaaacgcccggcggcaaccgagcgttctgaacaaatccagatggagttctgaggtcattactggatctatcaacaggagtccaagcgagctcgatatcaaattacgccccgccctgccactcatcgcagtactgttgtaattcattaagcattctgccgacatggaagccatcacagacggcatgatgaacctgaatcgccagcggcatcagcaccttgtcgccttgcgtataatatttgcccatggtgaaaacgggggcgaagaagttgtccatattggccacgtttaaatcaaaactggtgaaactcacccagggattggctgagacgaaaaacatattctcaataaaccctttagggaaataggccaggttttcaccgtaacacgccacatcttgcgaatatatgtgtagaaactgccggaaatcgtcgtggtattcactccagagcgatgaaaacgtttcagtttgctcatggaaaacggtgtaacaagggtgaacactatcccatatcaccagctcaccgtctttcattgccatacgaaactccggatgagcattcatcaggcgggcaagaatgtgaataaaggccggataaaacttgtgcttatttttctttacggtctttaaaaaggccgtaatatccagctgaacggtctggttataggtacattgagcaactgactgaaatgcctcaaaatgttctttacgatgccattgggatatatcaacggtggtatatccagtgatttttttctccattttagcttccttagctcctgaaaatctcgataactcaaaaaatacgcccggtagtgatcttatttcattatggtgaaagttggaacctcttacgtgccgatcaacgtctcattttcgccagatatcgacgtctaagaaaccattattatcatgacattaacctataaaaataggcgtatcacgaggccctttcgtcttcacctcgagaaatgtgagcggataacaattgacattgtgagcggataacaagatactgagcacatcagcaggacgcactgaccgggaattcattaaagaggagaaagtcgacatggcaaagatagctattaatggttttggaagaataggaagattagctttaagaagaattcttgaagtacctggattggaagttgttgcaataaacgacttaactgatgcaaaaatgttagcacacttatttaaatatgattcatcacaaggaagattcaatggagaaattgaagttaaagaaggagctttcgtagtaaacggaaaagaagttaaagttttcgctgaagcagatcctgaaaaattaccttggggagatcttggaatagacgttgttcttgagtgcacaggtttcttcacaaagaaagaaaaagcagaagctcacgtaagagcaggcgctaaaaaagttgttatatcagctccagctggaaacgacttaaagacaatagttttcaacgttaataatgaagatcttgatggaacagaaacagttatatcaggtgcatcatgcacaactaactgcttagctccaatggctaaagtattaaatgataaatttggaatagaaaaaggattcatgactacaattcatgcgttcactaatgaccaaaacacattagatggtccacacagaaaaggagatttaagaagagctagagctgctgctgtaagtatcatccctaactcaactggtgctgctaaagctataagccaagttattcctgacttagctggaaaattagacggaaacgctcaaagagttccagttccaactggttcaataactgaattagtttcagttcttaagaaaaaagttacagttgaagaaatcaacgctgctatgaaagaagctgctgatgaatcatttggatacactgaagatccaatcgtttcagctgacgtagtaggaatcaactacggatcattatttgatgcaactttaactaaaattgttgatgttaacggatcacaattagttaaaacagctgcttggtatgataatgaaatgtcatacacttcacaattagttagaactttagcttactttgcaaaaatagcaaaatagggatccataaggaggattaattaagacttcccgggtgatcccatggtacgcgtgctagaggcatcaaataaaacgaaaggctcagtcgaaagactgggcctttcgttttatctgttgtttgtcggtgaacgctctcctgagtaggacaaatccgccgccctagacctaggggatatattccgcttcctcgctcactgactcgctacgctcggtcgttcgactgcggcgagcggaaatggcttacgaacggggcggagatttcctggaagatgccaggaagatacttaacagggaagtgagagggccgcggcaaagccgtttttccataggctccgcccccctgacaagcatcacgaaatctgacgctcaaatcagtggtggcgaaacccgacaggactataaagataccaggcgtttccccctggcggctccctcgtgcgctctcctgttcctgcctttcggtttaccggtgtcattccgctgttatggccgcgtttgtctcattccacgcctgacactcagttccgggtaggcagttcgctccaagctggactgtatgcacgaaccccccgttcagtccgaccgctgcgccttatccggtaactatcgtcttgagtccaacccggaaagacatgcaaaagcaccactggcagcagccactggtaattgatttagaggagttagtcttgaagtcatgcgccggttaaggctaaactgaaaggacaagttttggtgactgcgctcctccaagccagttacctcggttcaaagagttggtagctcagagaaccttcgaaaaaccgccctgcaaggcggttttttcgttttcagagcaagagattacgcgcagaccaaaacgatctcaagaagatcatcttattaatcagataaaatatttctagatttcagtgcaatttatctcttcaaatgtagcacctgaagtcagccccatacgatataagttgtta

SEQ ID NO: 108 - DNA, 7093 bp, Artificial Sequence
  Plasmid pGV1609
cgatatcaaattacgccccgccctgccactcatcgcagtactgttgtaattcattaagcattctgccgacatggaagccatcacagacggcatgatgaacctgaatcgccagcggcatcagcaccttgtcgccttgcgtataatatttgcccatggtgaaaacgggggcgaagaagttgtccatattggccacgtttaaatcaaaactggtgaaactcacccagggattggctgagacgaaaaacatattctcaataaaccctttagggaaataggccaggttttcaccgtaacacgccacatcttgcgaatatatgtgtagaaactgccggaaatcgtcgtggtattcactccagagcgatgaaaacgtttcagtttgctcatggaaaacggtgtaacaagggtgaacactatcccatatcaccagctcaccgtctttcattgccatacgaaactccggatgagcattcatcaggcgggcaagaatgtgaataaaggccggataaaacttgtgcttatttttctttacggtctttaaaaaggccgtaatatccagctgaacggtctggttataggtacattgagcaactgactgaaatgcctcaaaatgttctttacgatgccattgggatatatcaacggtggtatatccagtgatttttttctccattttagcttccttagctcctgaaaatctcgataactcaaaaaatacgcccggtagtgatcttatttcattatggtgaaagttggaacctcttacgtgccgatcaacgtctcattttcgccagatatcgacgtctaagaaaccattattatcatgacattaacctataaaaataggcgtatcacgaggccctttcgtcttcacctcgagaattgtgagcggataacaattgacattgtgagcggataacaagatactgagcacatcagcaggacgcactgaccgaattcattaaagaggagaaaggtacaatgttgacaaaagcaacaaaagaacaaaaatcccttgtgaaaaacagaggggcggagcttgttgttgattgcttagtggagcaaggtgtcacacatgtatttggcattccaggtgcaaaaattgatgcggtatttgacgctttacaagataaaggacctgaaattatcgttgcccggcacgaacaaaacgcagcattcatggcccaagcagtcggccgtttaactggaaaaccgggagtcgtgttagtcacatcaggaccgggtgcctctaacttggcaacaggcctgctgacagcgaacactgaaggagaccctgtcgttgcgcttgctggaaacgtgatccgtgcagatcgtttaaaacggacacatcaatctttggataatgcggcgctattccagccgattacaaaatacagtgtagaagttcaagatgtaaaaaatataccggaagctgttacaaatgcatttaggatagcgtcagcagggcaggctggggccgcttttgtgagctttccgcaagatgttgtgaatgaagtcacaaatacgaaaaacgtgcgtgctgttgcagcgccaaaactcggtcctgcagcagatgatgcaatcagtgcggccatagcaaaaatccaaacagcaaaacttcctgtcgttttggtcggcatgaaaggcggaagaccggaagcaattaaagcggttcgcaagcttttgaaaaaggttcagcttccatttgttgaaacatatcaagctgccggtaccctttctagagatttagaggatcaatattttggccgtatcggtttgttccgcaaccagcctggcgatttactgctagagcaggcagatgttgttctgacgatcggctatgacccgattgaatatgatccgaaattctggaatatcaatggagaccggacaattatccatttagacgagattatcgctgacattgatcatgcttaccagcctgatcttgaattgatcggtgacattccgtccacgatcaatcatatcgaacacgatgctgtgaaagtggaatttgcagagcgtgagcagaaaatcctttctgatttaaaacaatatatgcatgaaggtgagcaggtgcctgcagattggaaatcagacagagcgcaccctcttgaaatcgttaaagagttgcgtaatgcagtcgatgatcatgttacagtaacttgcgatatcggttcgcacgccatttggatgtcacgttatttccgcagctacgagccgttaacattaatgatcagtaacggtatgcaaacactcggcgttgcgcttccttgggcaatcggcgcttcattggtgaaaccgggagaaaaagtggtttctgtctctggtgacggcggtttcttattctcagcaatggaattagagacagcagttcgactaaaagcaccaattgtacacattgtatggaacgacagcacatatgacatggttgcattccagcaattgaaaaaatataaccgtacatctgcggtcgatttcggaaatatcgatatcgtgaaatatgcggaaagcttcggagcaactggcttgcgcgtagaatcaccagaccagctggcagatgttctgcgtcaaggcatgaacgctgaaggtcctgtcatcatcgatgtcccggttgactacagtgataacattaatttagcaagtgacaagcttccgaaagaattcggggaactcatgaaaacgaaagctctctaggtcgacgaggaatcaccatggctaactacttcaatacactgaatctgcgccagcagctggcacagctgggcaaatgtcgctttatgggccgcgatgaattcgccgatggcgcgagctaccttcagggtaaaaaagtagtcatcgtcggctgtggcgcacagggtctgaaccagggcctgaacatgcgtgattctggtctcgatatctcctacgctctgcgtaaagaagcgattgccgagaagcgcgcgtcctggcgtaaagcgaccgaaaatggttttaaagtgggtacttacgaagaactgatcccacaggcggatctggtgattaacctgacgccggacaagcagcactctgatgtagtgcgcaccgtacagccactgatgaaagacggcgcggcgctgggctactcgcacggtttcaacatcgtcgaagtgggcgagcagatccgtaaagatatcaccgtagtgatggttgcgccgaaatgcccaggcaccgaagtgcgtgaagagtacaaacgtgggttcggcgtaccgacgctgattgccgttcacccggaaaacgatccgaaaggcgaaggcatggcgattgccaaagcctgggcggctgcaaccggtggtcaccgtgcgggtgtgctggaatcgtccttcgttgcggaagtgaaatctgacctgatgggcgagcaaaccatcctgtgcggtatgttgcaggctggctctctgctgtgcttcgacaagctggtggaagaaggtaccgatccagcatacgcagaaaaactgattcagttcggttgggaaaccatcaccgaagcactgaaacagggcggcatcaccctgatgatggaccgtctctctaacccggcgaaactgcgtgcttatgcgctttctgaacagctgaaagagatcatggcacccctgttccagaaacatatggacgacatcatctccggcgaattctcttccggtatgatggcggactgggccaacgatgataagaaactgctgacctggcgtgaagagaccggcaaaaccgcgtttgaaaccgcgccgcagtatgaaggcaaaatcggcgagcaggagtacttcgataaaggcgtactgatgattgcgatggtgaaagcgggcgttgaactggcgttcgaaaccatggtcgattccggcatcattgaagagtctgcatattatgaatcactgcacgagctgccgctgattgccaacaccatcgcccgtaagcgtctgtacgaaatgaacgtggttatctctgataccgctgagtacggtaactatctgttctcttacgcttgtgtgccgttgctgaaaccgtttatggcagagctgcaaccgggcgacctgggtaaagctattccggaaggcgcggtagataacgggcaactgcgtgatgtgaacgaagcgattcgcagccatgcgattgagcaggtaggtaagaaactgcgcggctatatgacagatatgaaacgtattgctgttgcgggttaacccggaaggagatataccatgcctaagtaccgttccgccaccaccactcatggtcgtaatatggcgggtgctcgtgcgctgtggcgcgccaccggaatgaccgacgccgatttcggtaagccgattatcgcggttgtgaactcgttcacccaatttgtaccgggtcacgtccatctgcgcgatctcggtaaactggtcgccgaacaaattgaagcggctggcggcgttgccaaagagttcaacaccattgcggtggatgatgggattgccatgggccacggggggatgctttattcactgccatctcgcgaactgatcgctgattccgttgagtatatggtcaacgcccactgcgccgacgccatggtctgcatctctaactgcgacaaaatcaccccggggatgctgatggcttccctgcgcctgaatattccggtgatctttgtttccggcggcccgatggaggccgggaaaaccaaactttccgatcagatcatcaagctcgatctggttgatgcgatgatccagggcgcagacccgaaagtatctgactcccagagcgatcaggttgaacgttccgcgtgtccgacctgcggttcctgctccgggatgtttaccgctaactcaatgaactgcctgaccgaagcgctgggcctgtcgcagccgggcaacggctcgctgctggcaacccacgccgaccgtaagcagctgttccttaatgctggtaaacgcattgttgaattgaccaaacgttattacgagcaaaacgacgaaagtgcactgccgcgtaatatcgccagtaaggcggcgtttgaaaacgccatgacgctggatatcgcgatgggtggatcgactaacaccgtacttcacctgctggcggcggcgcaggaagcggaaatcgacttcaccatgagtgatatcgataagctttcccgcaaggttccacagctgtgtaaagttgcgccgagcacccagaaataccatatggaagatgttcaccgtgctggtggtgttatcggtattctcggcgaactggatcgcgcggggttactgaaccgtgatgtgaaaaacgtacttggcctgacgttgccgcaaacgctggaacaatacgacgttatgctgacccaggatgacgcggtaaaaaatatgttccgcgcaggtcctgcaggcattcgtaccacacaggcattctcgcaagattgccgttgggatacgctggacgacgatcgcgccaatggctgtatccgctcgctggaacacgcctacagcaaagacggcggcctggcggtgctctacggtaactttgcggaaaacggctgcatcgtgaaaacggcaggcgtcgatgacagcatcctcaaattcaccggcccggcgaaagtgtacgaaagccaggacgatgcggtagaagcgattctcggcggtaaagttgtcgccggagatgtggtagtaattcgctatgaaggcccgaaaggcggtccggggatgcaggaaatgctctacccaaccagcttcctgaaatcaatgggtctcggcaaagcctgtgcgctgatcaccgacggtcgtttctctggtggcacctctggtctttccatcggccacgtctcaccggaagcggcaagcggcggcagcattggcctgattgaagatggtgacctgatcgctatcgacatcccgaaccgtggcattcagttacaggtaagcgatgccgaactggcggcgcgtcgtgaagcgcaggacgctcgaggtgacaaagcctggacgccgaaaaatcgtgaacgtcaggtctcctttgccctgcgtgcttatgccagcctggcaaccagcgccgacaaaggcgcggtgcgcgataaatcgaaactggggggttaaacgcgtgctagaggcatcaaataaaacgaaaggctcagtcgaaagactgggcctttcgttttatctgttgtttgtcggtgaacgctctcctgagtaggacaaatccgccgccctagacctaggggatatattccgcttcctcgctcactgactcgctacgctcggtcgttcgactgcggcgagcggaaatggcttacgaacggggcggagatttcctggaagatgccaggaagatacttaacagggaagtgagagggccgcggcaaagccgtttttccataggctccgcccccctgacaagcatcacgaaatctgacgctcaaatcagtggtggcgaaacccgacaggactataaagataccaggcgtttccccctggcggctccctcgtgcgctctcctgttcctgcctttcggtttaccggtgtcattccgctgttatggccgcgtttgtctcattccacgcctgacactcagttccgggtaggcagttcgctccaagctggactgtatgcacgaaccccccgttcagtccgaccgctgcgccttatccggtaactatcgtcttgagtccaacccggaaagacatgcaaaagcaccactggcagcagccactggtaattgatttagaggagttagtcttgaagtcatgcgccggttaaggctaaactgaaaggacaagttttggtgactgcgctcctccaagccagttacctcggttcaaagagttggtagctcagagaaccttcgaaaaaccgccctgcaaggcggttttttcgttttcagagcaagagattacgcgcagaccaaaacgatctcaagaagatcatcttattaatcagataaaatatttctagatttcagtgcaatttatctcttcaaatgtagcacctgaagtcagccccatacgatataagttgttactagtgcttggattctcaccaataaaaaacgcccggcggcaaccgagcgttctgaacaaatccagatggagttctgaggtcattactggatctatcaacaggagtccaagcgagct

SEQ ID NO: 109 - DNA, 7112 bp, Artificial Sequence
  Plasmid pGV1655
taagaaaccattattatcatgacattaacctataaaaataggcgtatcacgaggccctttcgtcttcacctcgagaattgtgagcggataacaattgacattgtgagcggataacaagatactgagcacatcagcaggacgcactgaccgaattcattaaagaggagaaaggtaccatgtatacagtaggagattacctattagaccgattacacgagttaggaattgaagaaatttttggagtccctggagactataacttacaatttttagatcaaattatttcccgcaaggatatgaaatgggtcggaaatgctaatgaattaaatgcttcatatatggctgatggctatgctcgtactaaaaaagctgccgcatttcttacaacctttggagtaggtgaattgagtgcagttaatggattagcaggaagttacgccgaaaatttaccagtagtagaaatagtgggatcacctacatcaaaagttcaaaatgaaggaaaatttgttcatcatacgctggctgacggtgattttaaacactttatgaaaatgcacgaacctgttacagcagctcgaactttactgacagcagaaaatgcaaccgttgaaattgaccgagtactttctgcactattaaaagaaagaaaacctgtctatatcaacttaccagttgatgttgctgctgcaaaagcagagaaaccctcactccctttgaaaaaagaaaactcaacttcaaatacaagtgaccaagagatcttgaacaaaattcaagaaagcttgaaaaatgccaaaaaaccaatcgtgattacaggacatgaaataattagttttggcttagaaaaaacagtctctcaatttatttcaaagacaaaactacctattacgacattaaactttggaaaaagttcagttgatgaagctctcccttcatttttaggaatctataatggtaaactctcagagcctaatcttaaagaattcgtggaatcagccgacttcatcctgatgcttggagttaaactcacagactcttcaacaggagccttcactcatcatttaaatgaaaataaaatgatttcactgaatatagatgaaggaaaaatatttaacgaaagcatccaaaattttgattttgaatccctcatctcctctctcttagacctaagcgaaatagaatacaaaggaaaatatatcgataaaaagcaagaagactttgttccatcaaatgcgcttttatcacaagaccgcctatggcaagcagttgaaaacctaactcaaagcaatgaaacaatcgttgctgaacaagggacatcattctttggcgcttcatcaattttcttaaaaccaaagagtcattttattggtcaacccttatggggatcaattggatatacattcccagcagcattaggaagccaaattgcagataaagaaagcagacaccttttatttattggtgatggttcacttcaacttacggtgcaagaattaggattagcaatcagagaaaaaattaatccaatttgctttattatcaataatgatggttatacagtcgaaagagaaattcatggaccaaatcaaagctacaatgatattccaatgtggaattactcaaaattaccagaatcatttggagcaacagaagaacgagtagtctcgaaaatcgttagaactgaaaatgaatttgtgtctgtcatgaaagaagctcaagcagatccaaatagaatgtactggattgagttaattttggcaaaagaagatgcaccaaaagtactgaaaaaaatgggcaaactatttgctgaacaaaataaatcataaggtcgacaggagatatactatgcctaaatatcgcagcgcaactactacccacggccgcaacatggcaggcgcgcgtgctctgtggcgtgcgactggtatgactgatgcggactttggcaaaccaatcattgctgtggttaatagctttactcagttcgttccaggccatgttcacctgcgtgacctgggcaagctggttgcggagcagatcgaggctgcgggtggtgtggcgaaggaatttaacaccatcgctgttgacgacggtatcgcgatgggtcatggtggtatgctgtacagcctgccgagccgtgagctgattgcggacagcgtggaatacatggttaatgcgcattgtgcggatgcgatggtttgtattagcaactgtgataagattactccaggtatgctgatggcgagcctgcgtctgaacatcccagttattttcgtgagcggtggtccaatggaagcgggtaagactaagctgagcgaccagattatcaaactggacctggtggacgctatgattcaaggtgctgatccaaaggttagcgatagccaatctgaccaagtggagcgcagcgcttgcccaacttgtggcagctgtagcggtatgttcactgcgaatagcatgaattgtctgactgaggctctgggtctgagccaaccaggtaatggtagcctgctggcgactcatgcggatcgcaaacaactgtttctgaacgcgggcaagcgtatcgtggagctgactaagcgctactatgaacagaatgatgagtccgcgctgccacgcaacattgcgtccaaagctgctttcgagaatgcgatgaccctggacattgctatgggcggtagcaccaatactgttctgcatctgctggctgctgctcaagaggctgagattgattttactatgtccgacattgacaaactgagccgtaaagtgccgcaactgtgcaaggtggctccatctactcaaaagtatcacatggaggacgtgcatcgcgcgggtggcgtgattggcatcctgggtgagctggaccgtgctggtctgctgaatcgcgacgttaagaatgttctgggtctgaccctgccacagaccctggagcagtatgatgtgatgctgactcaagacgatgctgttaagaacatgtttcgtgctggtccggcgggtatccgcactacccaagcgtttagccaggactgtcgctgggacaccctggatgatgaccgtgcgaacggttgcattcgtagcctggaacatgcgtattctaaggatggtggtctggctgttctgtatggcaatttcgctgagaatggttgtattgttaagaccgcgggtgttgacgattctattctgaagtttactggtccagctaaggtttatgagtctcaagatgacgctgttgaggctatcctgggtggcaaggtggttgcgggtgacgttgttgttatccgttacgagggtccaaagggtggcccaggtatgcaagagatgctgtatccgacttcttttctgaagagcatgggcctgggtaaggcgtgcgctctgattactgatggccgctttagcggcggtactagcggcctgagcattggtcatgttagcccagaggctgcgtctggtggttctatcggtctgatcgaggacggcgatctgattgcgattgatattccaaatcgcggtatccaactgcaagtttctgacgcggagctggctgctcgccgcgaggctcaagatgcgcgtggcgataaggcgtggaccccaaagaaccgcgagcgccaagttagcttcgcgctgcgcgcgtacgcctctctggcgacttctgcggataagggtgctgttcgtgacaagagcaagctgggtggctaaacgcgtgctagaggcatcaaataaaacgaaaggctcagtcgaaagactgggcctttcgttttatctgttgtttgtcggtgaacgctctcctgagtaggacaaatccgccgccctagacctagctagggtacgggttttgctgcccgcaaacgggctgttctggtgttgctagtttgttatcagaatcgcagatccggcttcagccggtttgccggctgaaagcgctatttcttccagaattgccatgattttttccccacgggaggcgtcactggctcccgtgttgtcggcagctttgattcgataagcagcatcgcctgtttcaggctgtctatgtgtgactgttgagctgtaacaagttgtctcaggtgttcaatttcatgttctagttgctttgttttactggtttcacctgttctattaggtgttacatgctgttcatctgttacattgtcgatctgttcatggtgaacagctttaaatgcaccaaaaactcgtaaaagctctgatgtatctatcttttttacaccgttttcatctgtgcatatggacagttttccctttgatatctaacggtgaacagttgttctacttttgtttgttagtcttgatgcttcactgatagatacaagagccataagaacctcagatccttccgtatttagccagtatgttctctagtgtggttcgttgtttttgcgtgagccatgagaacgaaccattgagatcatgcttactttgcatgtcactcaaaaattttgcctcaaaactggtgagctgaatttttgcagttaaagcatcgtgtagtgtttttcttagtccgttacgtaggtaggaatctgatgtaatggttgttggtattttgtcaccattcatttttatctggttgttctcaagttcggttacgagatccatttgtctatctagttcaacttggaaaatcaacgtatcagtcgggcggcctcgcttatcaaccaccaatttcatattgctgtaagtgtttaaatctttacttattggtttcaaaacccattggttaagccttttaaactcatggtagttattttcaagcattaacatgaacttaaattcatcaaggctaatctctatatttgccttgtgagttttcttttgtgttagttcttttaataaccactcataaatcctcatagagtatttgttttcaaaagacttaacatgttccagattatattttatgaatttttttaactggaaaagataaggcaatatctcttcactaaaaactaattctaatttttcgcttgagaacttggcatagtttgtccactggaaaatctcaaagcctttaaccaaaggattcctgatttccacagttctcgtcatcagctctctggttgctttagctaatacaccataagcattttccctactgatgttcatcatctgagcgtattggttataagtgaacgataccgtccgttctttccttgtagggttttcaatcgtggggttgagtagtgccacacagcataaaattagcttggtttcatgctccgttaagtcatagcgactaatcgctagttcatttgctttgaaaacaactaattcagacatacatctcaattggtctaggtgattttaatcactataccaattgagatgggctagtcaatgataattactagtccttttcccgggagatctgggtatctgtaaattctgctagacctttgctggaaaacttgtaaattctgctagaccctctgtaaattccgctagacctttgtgtgttttttttgtttatattcaagtggttataatttatagaataaagaaagaataaaaaaagataaaaagaatagatcccagccctgtgtataactcactactttagtcagttccgcagtattacaaaaggatgtcgcaaacgctgtttgctcctctacaaaacagaccttaaaaccctaaaggcttaagtagcaccctcgcaagctcgggcaaatcgctgaatattccttttgtctccgaccatcaggcacctgagtcgctgtctttttcgtgacattcagttcgctgcgctcacggctctggcagtgaatgggggtaaatggcactacaggcgccttttatggattcatgcaaggaaactacccataatacaagaaaagcccgtcacgggcttctcagggcgttttatggcgggtctgctatgtggtgctatctgactttttgctgttcagcagttcctgccctctgattttccagtctgaccacttcggattatcccgtgacaggtcattcagactggctaatgcacccagtaaggcagcggtatcatcaacaggcttacccgtcttactgtccctagtgcttggattctcaccaataaaaaacgcccggcggcaaccgagcgttctgaacaaatccagatggagttctgaggtcattactggatctatcaacaggagtccaagcgagctctcgaaccccagagtcccgctcagaagaactcgtcaagaaggcgatagaaggcgatgcgctgcgaatcgggagcggcgataccgtaaagcacgaggaagcggtcagcccattcgccgccaagctcttcagcaatatcacgggtagccaacgctatgtcctgatagcggtccgccacacccagccggccacagtcgatgaatccagaaaagcggccattttccaccatgatattcggcaagcaggcatcgccatgggtcacgacgagatcctcgccgtcgggcatgcgcgccttgagcctggcgaacagttcggctggcgcgagcccctgatgctcttcgtccagatcatcctgatcgacaagaccggcttccatccgagtacgtgctcgctcgatgcgatgtttcgcttggtggtcgaatgggcaggtagccggatcaagcgtatgcagccgccgcattgcatcagccatgatggatactttctcggcaggagcaaggtgagatgacaggagatcctgccccggcacttcgcccaatagcagccagtcccttcccgcttcagtgacaacgtcgagcacagctgcgcaaggaacgcccgtcgtggccagccacgatagccgcgctgcctcgtcctgcagttcattcagggcaccggacaggtcggtcttgacaaaaagaaccgggcgcccctgcgctgacagccggaacacggcggcatcagagcagccgattgtctgttgtgcccagtcatagccgaatagcctctccacccaagcggccggagaacctgcgtgcaatccatcttgttcaatcatgcgaaacgatcctcatcctgtctcttgatcagatcttgatcccctgcgccatcagatccttggcggcaagaaagccatccagtttactttgcagggcttcccaaccttaccagagggcgccccagctggcaattccgacgtc

SEQ ID NO: 110 - DNA, 7884 bp, Artificial Sequence
  Plasmid pGV1661
ctcgagtccctatcagtgatagagattgacatccctatcagtgatagagatactgagcacatcagcaggacgcactgaccgaattcattaaagaggaacaaccaaatggatgaccagttaaaacaaagtgcacttgatttccatgaatttccagttccagggaaaatccaggtttctccaaccaagcctctggcaacacagcgcgatctggcgctggcctactcaccaggcgttgccgcaccttgtcttgaaatcgaaaaagacccgttaaaagcctacaaatataccgcccgaggtaacctggtggcggtgatctctaacggtacggcggtgctggggttaggcaacattggcgcgctggcaggcaaaccggtgatggaaggcaagggcgttctgtttaagaaattcgccgggattgatgtatttgacattgaagttgacgaactcgacccggacaaatttattgaagttgtcgccgcgctcgaaccaaccttcggcggcatcaacctcgaagacattaaagcgccagaatgtttctatattgaacagaaactgcgcgagcggatgaatattccggtattccacgacgatcagcacggcacggcaattatcagcactgccgccatcctcaacggcttgcgcgtggtggagaaaaacatctccgacgtgcggatggtggtttccggcgcgggtgccgcagcaatcgcctgtatgaacctgctggtagcgctgggtctgcaaaaacataacatcgtggtttgcgattcaaaaggcgttatctatcagggccgtgagccaaacatggcggaaaccaaagccgcatatgcggtggtggatgacggcaaacgtaccctcgatgatgtgattgaaggcgcggatattttcctgggctgttccggcccgaaagtgctgacccaggaaatggtgaagaaaatggctcgtgcgccaatgatcctggcgctggcgaacccggaaccggaaattctgccgccgctggcgaaagaagtgcgtccggatgccatcatttgcaccggtcgttctgactatccgaaccaggtgaacaacgtcctgtgcttcccgttcatcttccgtggcgcgctggacgttggcgcaaccgccatcaacgaagagatgaaactggcggcggtacgtgcgattgcagaactcgcccatgcggaacagagcgaagtggtggcttcagcgtatggcgatcaggatctgagctttggtccggaatacatcattccaaaaccgtttgatccgcgcttgatcgttaagatcgctcctgcggtcgctaaagccgcgatggagtcgggcgtggcgactcgtccgattgctgatttcgacgtctacatcgacaagctgactgagttcgtttacaaaaccaacctgtttatgaagccgattttctcccaggctcgcaaagcgccgaagcgcgttgttctgccggaaggggaagaggcgcgcgttctgcatgccactcaggaactggtaacgctgggactggcgaaaccgatccttatcggtcgtccgaacgtgatcgaaatgcgcattcagaaactgggcttgcagatcaaagcgggcgttgattttgagatcgtcaataacgaatccgatccgcgctttaaagagtactggaccgaatacttccagatcatgaagcgtcgcggcgtcactcaggaacaggcgcagcgggcgctgatcagtaacccgacagtgatcggcgcgatcatggttcagcgtggggaagccgatgcaatgatttgcggtacggtgggtgattatcatgaacattttagcgtggtgaaaaatgtctttggttatcgcgatggcgttcacaccgcaggtgccatgaacgcgctgctgctgccgagtggtaacacctttattgccgatacatatgttaatgatgaaccggatgcagaagagctggcggagatcaccttgatggcggcagaaactgtccgtcgttttggtattgagccgcgcgttgctttgttgtcgcactccaactttggttcttctgactgcccgtcgtcgagcaaaatgcgtcaggcgctggaactggtcagggaacgtgcaccagaactgatgattgatggtgaaatgcacggcgatgcagcgctggtggaagcgattcgcaacgaccgtatgccggacagctctttgaaaggttccgccaatattctggtgatgccgaacatggaagctgcccgcattagttacaacttactgcgtgtttccagctcggaaggtgtgactgtcggcccggtgctgatgggtgtggcgaaaccggttcacgtgttaacgccgatcgcatcggtgcgtcgtatcgtcaacatggtggcgctggccgtggtagaagcgcaaacccaaccgctgtaaggtaccattaaagaggagaaacgtagcatgaacgaacaatattccgcattgcgtagtaatgtcagtatgctcggcaaagtgctgggagaaaccatcaaggatgcgttgggagaacacattcttgaacgcgtagaaactatccgtaagttgtcgaaatcttcacgcgctggcaatgatgctaaccgccaggagttgctcaccaccttacaaaatttgtcgaacgacgagctgctgcccgttgcgcgtgcgtttagtcagttcctgaacctggccaacaccgccgagcaataccacagcatttcgccgaaaggcgaagctgccagcaacccggaagtgatcgcccgcaccctgcgtaaactgaaaaaccagccggaactgagcgaagacaccatcaaaaaagcagtggaatcgctgtcgctggaactggtcctcacggctcacccaaccgaaattacccgtcgtacactgatccacaaaatggtggaagtgaacgcctgtttaaaacagctcgataacaaagatatcgctgactacgaacacaaccagctgatgcgtcgcctgcgccagttgatcgcccagtcatggcataccgatgaaatccgtaagctgcgtccaagcccggtagatgaagccaaatggggctttgccgtagtggaaaacagcctgtggcaaggcgtaccaaattacctgcgcgaactgaacgaacaactggaagagaacctcggctacaaactgcccgtcgaatttgttccggtccgttttacttcgtggatgggcggcgaccgcgacggcaacccgaacgtcactgccgatatcacccgccacgtcctgctactcagccgctggaaagccaccgatttgttcctgaaagatattcaggtgctggtttctgaactgtcgatggttgaagcgacccctgaactgctggcgctggttggcgaagaaggtgccgcagaaccgtatcgctatctgatgaaaaacctgcgttctcgcctgatggcgacacaggcatggctggaagcgcgcctgaaaggcgaagaactgccaaaaccagaaggcctgctgacacaaaacgaagaactgtgggaaccgctctacgcttgctaccagtcacttcaggcgtgtggcatgggtattatcgccaacggcgatctgctcgacaccctgcgccgcgtgaaatgtttcggcgtaccgctggtccgtattgatatccgtcaggagagcacgcgtcataccgaagcgctgggcgagctgacccgctacctcggtatcggcgactacgaaagctggtcagaggccgacaaacaggcgttcctgatccgcgaactgaactccaaacgtccgcttctgccgcgcaactggcaaccaagcgccgaaacgcgcgaagtgctcgatacctgccaggtgattgccgaagcaccgcaaggctccattgccgcctacgtgatctcgatggcgaaaacgccgtccgacgtactggctgtccacctgctgctgaaagaagcgggtatcgggtttgcgatgccggttgctccgctgtttgaaaccctcgatgatctgaacaacgccaacgatgtcatgacccagctgctcaatattgactggtatcgtggcctgattcagggcaaacagatggtgatgattggctattccgactcagcaaaagatgcgggagtgatggcagcttcctgggcgcaatatcaggcacaggatgcattaatcaaaacctgcgaaaaagcgggtattgagctgacgttgttccacggtcgcggcggttccattggtcgcggcggcgcacctgctcatgcggcgctgctgtcacaaccgccaggaagcctgaaaggcggcctgcgcgtaaccgaacagggcgagatgatccgctttaaatatggtctgccagaaatcaccgtcagcagcctgtcgctttataccggggcgattctggaagccaacctgctgccaccgccggagccgaaagagagctggcgtcgcattatggatgaactgtcagtcatctcctgcgatgtctaccgcggctacgtacgtgaaaacaaagattttgtgccttacttccgctccgctacgccggaacaagaactgggcaaactgccgttgggttcacgtccggcgaaacgtcgcccaaccggcggcgtcgagtcactacgcgccattccgtggatcttcgcctggacgcaaaaccgtctgatgctccccgcctggctgggtgcaggtacggcgctgcaaaaagtggtcgaagacggcaaacagagcgagctggaggctatgtgccgcgattggccattcttctcgacgcgtctcggcatgctggagatggtcttcgccaaagcagacctgtggctggcggaatactatgaccaacgcctggtagacaaagcactgtggccgttaggtaaagagttacgcaacctgcaagaagaagacatcaaagtggtgctggcgattgccaacgattcccatctgatggccgatctgccgtggattgcagagtctattcagctacggaatatttacaccgacccgctgaacgtattgcaggccgagttgctgcaccgctcccgccaggcagaaaaagaaggccaggaaccggatcctcgcgtcgaacaagcgttaatggtcactattgccgggattgcggcaggtatgcgtaataccggctaagtcgacattaaagaggagattacttatgaaagttgctgttctgggtgctgcaggtggtattggtcaggcactggccctgctgctgaaaactcagctgccgagcggttctgaactgtccctgtacgatattgcgcctgttactccgggtgtcgctgtagacctgtctcatatccctacggcagtaaaaatcaaaggctttagcggtgaagatgcaactccggcgctggaaggtgccgacgttgtactgatctctgcgggcgtggctcgtaaaccgggcatggaccgttctgatctgttcaacgtgaacgctggcattgttaaaaatctggtgcagcaggttgcaaaaacctgtccgaaagcgtgcattggcatcatcactaacccagttaacaccaccgtcgcgatcgcggcagaagtcctgaagaaagcaggcgtgtacgataaaaacaaactgttcggtgttactaccctggacatcatccgttctaatactttcgtagctgagctgaaaggcaaacagccgggtgaagttgaagttccggttatcggtggccacagcggtgttaccatcctgcctctgctgagccaggttccgggtgtgtctttcaccgaacaagaagtagcggacctgaccaaacgtatccaaaacgctggcaccgaagttgttgaagccaaagcaggtggtggctctgctaccctgtctatgggtcaagcggcagcacgctttggcctgtctctggttcgcgctctgcagggtgaacaaggtgtggtagaatgtgcttacgttgaaggcgatggccagtatgcacgcttcttctcccaacctctgctgctgggcaaaaacggtgttgaggaacgtaaatctatcggcactctgtccgcgttcgaacaaaacgcgctggaaggcatgctggatactctgaagaaagatatcgctctgggtgaggaatttgttaacaaatgacctagggatatattccgcttcctcgctcactgactcgctacgctcggtcgttcgactgcggcgagcggaaatggcttacgaacggggcggagatttcctggaagatgccaggaagatacttaacagggaagtgagagggccgcggcaaagccgtttttccataggctccgcccccctgacaagcatcacgaaatctgacgctcaaatcagtggtggcgaaacccgacaggactataaagataccaggcgtttccccctggcggctccctcgtgcgctctcctgttcctgcctttcggtttaccggtgtcattccgctgttatggccgcgtttgtctcattccacgcctgacactcagttccgggtaggcagttcgctccaagctggactgtatgcacgaaccccccgttcagtccgaccgctgcgccttatccggtaactatcgtcttgagtccaacccggaaagacatgcaaaagcaccactggcagcagccactggtaattgatttagaggagttagtcttgaagtcatgcgccggttaaggctaaactgaaaggacaagttttggtgactgcgctcctccaagccagttacctcggttcaaagagttggtagctcagagaaccttcgaaaaaccgccctgcaaggcggttttttcgttttcagagcaagagattacgcgcagaccaaaacgatctcaagaagatcatcttattaatcagataaaatatttctagatttcagtgcaatttatctcttcaaatgtagcacctgaagtcagccccatacgatataagttgttactagtgcttggattctcaccaataaaaaacgcccggcggcaaccgagcgttctgaacaaatccagatggagttctgaggtcattactggatctatcaacaggagtccaagcgagctcgatatcaaattacgccccgccctgccactcatcgcagtactgttgtaattcattaagcattctgccgacatggaagccatcacagacggcatgatgaacctgaatcgccagcggcatcagcaccttgtcgccttgcgtataatatttgcccatggtgaaaacgggggcgaagaagttgtccatattggccacgtttaaatcaaaactggtgaaactcacccagggattggctgagacgaaaaacatattctcaataaaccctttagggaaataggccaggttttcaccgtaacacgccacatcttgcgaatatatgtgtagaaactgccggaaatcgtcgtggtattcactccagagcgatgaaaacgtttcagtttgctcatggaaaacggtgtaacaagggtgaacactatcccatatcaccagctcaccgtctttcattgccatacgaaactccggatgagcattcatcaggcgggcaagaatgtgaataaaggccggataaaacttgtgcttatttttctttacggtctttaaaaaggccgtaatatccagctgaacggtctggttataggtacattgagcaactgactgaaatgcctcaaaatgttctttacgatgccattgggatatatcaacggtggtatatccagtgatttttttctccattttagcttccttagctcctgaaaatctcgataactcaaaaaatacgcccggtagtgatcttatttcattatggtgaaagttggaacctcttacgtgccgatcaacgtctcattttcgccagatatcgacgtctaagaaaccattattatcatgacattaacctataaaaataggcgtatcacgaggccctttcgtcttcacgaaaccattattatcatgacattaacctataaaaataggcgtatcacgaggccctttcgtcttcac

SEQ ID NO: 111 - DNA, 4895 bp, Artificial Sequence
  Plasmid pGV1685
ctcgagtccctatcagtgatagagattgacatccctatcagtgatagagatactgagcacatcagcaggacgcactgaccgaattcattaaagaggagaaaggtaccatgcgaattggcataccaagagaacggttaaccaatgaaacccgtgttgcagcaacgccaaaaacagtggaacagctgctgaaactgggttttaccgtcgcggtagagagcggcgcgggtcaactggcaagttttgacgataaagcgtttgtgcaagcgggcgctgaaattgtagaagggaatagcgtctggcagtcagagatcattctgaaggtcaatgcgccgttagatgatgaaattgcgttactgaatcctgggacaacgctggtgagttttatctggcctgcgcagaatccggaattaatgcaaaaacttgcggaacgtaacgtgaccgtgatggcgatggactctgtgccgcgtatctcacgcgcacaatcgctggacgcactaagctcgatggcgaacatcgccggttatcgcgccattgttgaagcggcacatgaatttgggcgcttctttaccgggcaaattactgcggccgggaaagtgccaccggcaaaagtgatggtgattggtgcgggtgttgcaggtctggccgccattggcgcagcaaacagtctcggcgcgattgtgcgtgcattcgacacccgcccggaagtgaaagaacaagttcaaagtatgggcgcggaattcctcgagctggattttaaagaggaagctggcagcggcgatggctatgccaaagtgatgtcggacgcgttcatcaaagcggaaatggaactctttgccgcccaggcaaaagaggtcgatatcattgtcaccaccgcgcttattccaggcaaaccagcgccgaagctaattacccgtgaaatggttgactccatgaaggcgggcagtgtgattgtcgacctggcagcccaaaacggcggcaactgtgaatacaccgtgccgggtgaaatcttcactacggaaaatggtgtcaaagtgattggttataccgatcttccgggccgtctgccgacgcaatcctcacagctttacggcacaaacctcgttaatctgctgaaactgttgtgcaaagagaaagacggcaatatcactgttgattttgatgatgtggtgattcgcggcgtgaccgtgatccgtgcgggcgaaattacctggccggcaccgccgattcaggtatcagctcagccgcaggcggcacaaaaagcggcaccggaagtgaaaactgaggaaaaatgtacctgctcaccgtggcgtaaatacgcgttgatggcgctggcaatcattctttttggctggatggcaagcgttgcgccgaaagaattccttgggcacttcaccgttttcgcgctggcctgcgttgtcggttattacgtggtgtggaatgtatcgcacgcgctgcatacaccgttgatgtcggtcaccaacgcgatttcagggattattgttgtcggagcactgttgcagattggccagggcggctgggttagcttccttagttttatcgcggtgcttatagccagcattaatattttcggtggcttcaccgtgactcagcgcatgctgaaaatgttccgcaaaaattaaggggtaacatatgtctggaggattagttacagctgcatacattgttgccgcgatcctgtttatcttcagtctggccggtctttcgaaacatgaaacgtctcgccagggtaacaacttcggtatcgccgggatggcgattgcgttaatcgcaaccatttttggaccggatacgggtaatgttggctggatcttgctggcgatggtcattggtggggcaattggtatccgtctggcgaagaaagttgaaatgaccgaaatgccagaactggtggcgatcctgcatagcttcgtgggtctggcggcagtgctggttggctttaacagctatctgcatcatgacgcgggaatggcaccgattctggtcaatattcacctgacggaagtgttcctcggtatcttcatcggggcggtaacgttcacgggttcggtggtggcgttcggcaaactgtgtggcaagatttcgtctaaaccattgatgctgccaaaccgtcacaaaatgaacctggcggctctggtcgtttccttcctgctgctgattgtatttgttcgcacggacagcgtcggcctgcaagtgctggcattgctgataatgaccgcaattgcgctggtattcggctggcatttagtcgcctccatcggtggtgcagatatgccagtggtggtgtcgatgctgaactcgtactccggctgggcggctgcggctgcgggctttatgctcagcaacgacctgctgattgtgaccggtgcgctggtcggttcttcgggggctatcctttcttacattatgtgtaaggcgatgaaccgttcctttatcagcgttattgcgggtggtttcggcaccgacggctcttctactggcgatgatcaggaagtgggtgagcaccgcgaaatcaccgcagaagagacagcggaactgctgaaaaactcccattcagtgatcattactccggggtacggcatggcagtcgcgcaggcgcaatatcctgtcgctgaaattactgagaaattgcgcgctcgtggtattaatgtgcgtttcggtatccacccggtcgcggggcgtttgcctggacatatgaacgtattgctggctgaagcaaaagtaccgtatgacatcgtgctggaaatggacgagatcaatgatgactttgctgataccgataccgtactggtgattggtgctaacgatacggttaacccggcggcgcaggatgatccgaagagtccgattgctggtatgcctgtgctggaagtgtggaaagcgcagaacgtgattgtctttaaacgttcgatgaacactggctatgctggtgtgcaaaacccgctgttcttcaaggaaaacacccacatgctgtttggtgacgccaaagccagcgtggatgcaatcctgaaagctctgtaacctagggatatattccgcttcctcgctcactgactcgctacgctcggtcgttcgactgcggcgagcggaaatggcttacgaacggggcggagatttcctggaagatgccaggaagatacttaacagggaagtgagagggccgcggcaaagccgtttttccataggctccgcccccctgacaagcatcacgaaatctgacgctcaaatcagtggtggcgaaacccgacaggactataaagataccaggcgtttccccctggcggctccctcgtgcgctctcctgttcctgcctttcggtttaccggtgtcattccgctgttatggccgcgtttgtctcattccacgcctgacactcagttccgggtaggcagttcgctccaagctggactgtatgcacgaaccccccgttcagtccgaccgctgcgccttatccggtaactatcgtcttgagtccaacccggaaagacatgcaaaagcaccactggcagcagccactggtaattgatttagaggagttagtcttgaagtcatgcgccggttaaggctaaactgaaaggacaagttttggtgactgcgctcctccaagccagttacctcggttcaaagagttggtagctcagagaaccttcgaaaaaccgccctgcaaggcggttttttcgttttcagagcaagagattacgcgcagaccaaaacgatctcaagaagatcatcttattaatcagataaaatatttctagatttcagtgcaatttatctcttcaaatgtagcacctgaagtcagccccatacgatataagttgttactagtgcttggattctcaccaataaaaaacgcccggcggcaaccgagcgttctgaacaaatccagatggagttctgaggtcattactggatctatcaacaggagtccaagcgagctcgatatcaaattacgccccgccctgccactcatcgcagtactgttgtaattcattaagcattctgccgacatggaagccatcacagacggcatgatgaacctgaatcgccagcggcatcagcaccttgtcgccttgcgtataatatttgcccatggtgaaaacgggggcgaagaagttgtccatattggccacgtttaaatcaaaactggtgaaactcacccagggattggctgagacgaaaaacatattctcaataaaccctttagggaaataggccaggttttcaccgtaacacgccacatcttgcgaatatatgtgtagaaactgccggaaatcgtcgtggtattcactccagagcgatgaaaacgtttcagtttgctcatggaaaacggtgtaacaagggtgaacactatcccatatcaccagctcaccgtctttcattgccatacgaaactccggatgagcattcatcaggcgggcaagaatgtgaataaaggccggataaaacttgtgcttatttttctttacggtctttaaaaaggccgtaatatccagctgaacggtctggttataggtacattgagcaactgactgaaatgcctcaaaatgttctttacgatgccattgggatatatcaacggtggtatatccagtgatttttttctccattttagcttccttagctcctgaaaatctcgataactcaaaaaatacgcccggtagtgatcttatttcattatggtgaaagttggaacctcttacgtgccgatcaacgtctcattttcgccagatatcgacgtctaagaaaccattattatcatgacattaacctataaaaataggcgtatcacgaggccctttcgtcttcacgaaaccattattatcatgacattaacctataaaaataggcgtatcacgaggccctttcgtcttcac

SEQ ID NO: 112 - DNA, 5336 bp, Artificial Sequence
  Plasmid pGV1698
taagaaaccattattatcatgacattaacctataaaaataggcgtatcacgaggccctttcgtcttcacctcgagaattgtgagcggataacaattgacattgtgagcggataacaagatactgagcacatcagcaggacgcactgaccgaattcattaaagaggagaaaggtacaatgttgacaaaagcaacaaaagaacaaaaatcccttgtgaaaaacagaggggcggagcttgttgttgattgcttagtggagcaaggtgtcacacatgtatttggcattccaggtgcaaaaattgatgcggtatttgacgctttacaagataaaggacctgaaattatcgttgcccggcacgaacaaaacgcagcattcatggcccaagcagtcggccgtttaactggaaaaccgggagtcgtgttagtcacatcaggaccgggtgcctctaacttggcaacaggcctgctgacagcgaacactgaaggagaccctgtcgttgcgcttgctggaaacgtgatccgtgcagatcgtttaaaacggacacatcaatctttggataatgcggcgctattccagccgattacaaaatacagtgtagaagttcaagatgtaaaaaatataccggaagctgttacaaatgcatttaggatagcgtcagcagggcaggctggggccgcttttgtgagctttccgcaagatgttgtgaatgaagtcacaaatacgaaaaacgtgcgtgctgttgcagcgccaaaactcggtcctgcagcagatgatgcaatcagtgcggccatagcaaaaatccaaacagcaaaacttcctgtcgttttggtcggcatgaaaggcggaagaccggaagcaattaaagcggttcgcaagcttttgaaaaaggttcagcttccatttgttgaaacatatcaagctgccggtaccctttctagagatttagaggatcaatattttggccgtatcggtttgttccgcaaccagcctggcgatttactgctagagcaggcagatgttgttctgacgatcggctatgacccgattgaatatgatccgaaattctggaatatcaatggagaccggacaattatccatttagacgagattatcgctgacattgatcatgcttaccagcctgatcttgaattgatcggtgacattccgtccacgatcaatcatatcgaacacgatgctgtgaaagtggaatttgcagagcgtgagcagaaaatcctttctgatttaaaacaatatatgcatgaaggtgagcaggtgcctgcagattggaaatcagacagagcgcaccctcttgaaatcgttaaagagttgcgtaatgcagtcgatgatcatgttacagtaacttgcgatatcggttcgcacgccatttggatgtcacgttatttccgcagctacgagccgttaacattaatgatcagtaacggtatgcaaacactcggcgttgcgcttccttgggcaatcggcgcttcattggtgaaaccgggagaaaaagtggtttctgtctctggtgacggcggtttcttattctcagcaatggaattagagacagcagttcgactaaaagcaccaattgtacacattgtatggaacgacagcacatatgacatggttgcattccagcaattgaaaaaatataaccgtacatctgcggtcgatttcggaaatatcgatatcgtgaaatatgcggaaagcttcggagcaactggcttgcgcgtagaatcaccagaccagctggcagatgttctgcgtcaaggcatgaacgctgaaggtcctgtcatcatcgatgtcccggttgactacagtgataacattaatttagcaagtgacaagcttccgaaagaattcggggaactcatgaaaacgaaagctctctaggtcgacgaggagacaacattatggcgaattatttcaacactctgaacctgcgtcaacaactggcgcaactgggtaagtgccgtttcatgggtcgtgacgagtttgcggacggtgcttcttatctgcaaggcaagaaggttgttattgttggttgcggtgcgcaaggcctgaatcaaggtctgaatatgcgcgacagcggcctggacattagctatgcgctgcgcaaggaggctatcgcggaaaaacgtgctagctggcgcaaggctactgagaacggcttcaaggttggcacctatgaggagctgattccgcaagctgacctggttatcaatctgaccccagataaacaacatagcgacgttgttcgtactgttcaaccgctgatgaaggatggtgctgctctgggttatagccacggctttaacattgttgaggtaggtgaacaaattcgcaaggacattactgttgttatggtggctccaaagtgtccgggtactgaggttcgcgaggaatataagcgcggttttggtgttccaaccctgatcgcggtgcatccagagaatgacccaaagggtgagggtatggctatcgcgaaggcgtgggctgcggcgactggcggccatcgcgctggcgttctggagagcagctttgtggctgaggttaagagcgatctgatgggtgaacagactattctgtgtggtatgctgcaagcgggtagcctgctgtgttttgataaactggttgaggagggcactgacccggcgtatgcggagaagctgatccaatttggctgggagactattactgaggcgctgaagcaaggtggtattactctgatgatggatcgcctgagcaatccagctaagctgcgcgcgtacgctctgagcgagcaactgaaggaaattatggcaccgctgtttcaaaagcacatggatgatatcattagcggtgagtttagcagcggcatgatggctgattgggcgaatgacgacaaaaagctgctgacttggcgcgaggaaactggtaagactgctttcgagactgctccacaatacgagggtaagattggtgaacaagaatattttgacaagggtgttctgatgatcgctatggttaaggctggtgtggagctggcttttgagactatggttgacagcggtattatcgaggaaagcgcgtactacgagagcctgcatgaactgccactgatcgcgaatactattgcgcgcaaacgcctgtatgagatgaatgttgtgattagcgacactgcggaatatggcaattacctgtttagctatgcgtgcgttccactgctgaagccattcatggcggaactgcagccaggtgatctgggcaaggcgatcccagagggtgctgttgacaatggtcagctgcgcgacgttaatgaggctatccgttctcacgctatcgaacaagttggcaaaaagctgcgtggttacatgaccgacatgaagcgcatcgcggtggctggctaacctagggcgttcggctgcggcgagcggtatcagctcactcaaaggcggtaatacggttatccacagaatcaggggataacgcaggaaagaacatgtgagcaaaaggccagcaaaaggccaggaaccgtaaaaaggccgcgttgctggcgtttttccataggctccgcccccctgacgagcatcacaaaaatcgacgctcaagtcagaggtggcgaaacccgacaggactataaagataccaggcgtttccccctggaagctccctcgtgcgctctcctgttccgaccctgccgcttaccggatacctgtccgcctttctcccttcgggaagcgtggcgctttctcatagctcacgctgtaggtatctcagttcggtgtaggtcgttcgctccaagctgggctgtgtgcacgaaccccccgttcagcccgaccgctgcgccttatccggtaactatcgtcttgagtccaacccggtaagacacgacttatcgccactggcagcagccactggtaacaggattagcagagcgaggtatgtaggcggtgctacagagttcttgaagtggtggcctaactacggctacactagaaggacagtatttggtatctgcgctctgctgaagccagttaccttcggaaaaagagttggtagctcttgatccggcaaacaaaccaccgctggtagcggtggtttttttgtttgcaagcagcagattacgcgcagaaaaaaaggatctcaagaagatcctttgatcttttctacggggtctgacgctcagtggaacgaaaactcacgttaagggattttggtcatgactagtgcttggattctcaccaataaaaaacgcccggcggcaaccgagcgttctgaacaaatccagatggagttctgaggtcattactggatctatcaacaggagtccaagcgagctcgtaaacttggtctgacagttaccaatgcttaatcagtgaggcacctatctcagcgatctgtctatttcgttcatccatagttgcctgactccccgtcgtgtagataactacgatacgggagggcttaccatctggccccagtgctgcaatgataccgcgagacccacgctcaccggctccagatttatcagcaataaaccagccagccggaagggccgagcgcagaagtggtcctgcaactttatccgcctccatccagtctattaattgttgccgggaagctagagtaagtagttcgccagttaatagtttgcgcaacgttgttgccattgctacaggcatcgtggtgtcacgctcgtcgtttggtatggcttcattcagctccggttcccaacgatcaaggcgagttacatgatcccccatgttgtgcaaaaaagcggttagctccttcggtcctccgatcgttgtcagaagtaagttggccgcagtgttatcactcatggttatggcagcactgcataattctcttactgtcatgccatccgtaagatgcttttctgtgactggtgagtactcaaccaagtcattctgagaatagtgtatgcggcgaccgagttgctcttgcccggcgtcaatacgggataataccgcgccacatagcagaactttaaaagtgctcatcattggaaaacgttcttcggggcgaaaactctcaaggatcttaccgctgttgagatccagttcgatgtaacccactcgtgcacccaactgatcttcagcatcttttactttcaccagcgtttctgggtgagcaaaaacaggaaggcaaaatgccgcaaaaaagggaataagggcgacacggaaatgttgaatactcatactcttcctttttcaatattattgaagcatttatcagggttattgtctcatgagcggatacatatttgaatgtatttagaaaaataaacaaataggggttccgcgcacatttccccgaaaagtgccacctgacgtc

SEQ ID NO: 113 - DNA, 2289 bp, Artificial Sequence
  Plasmid pGV1711
ctagtgcttggattctcaccaataaaaaacgcccggcggcaaccgagcgttctgaacaaatccagatggagttctgaggtcattactggatctatcaacaggagtccaagcgagctcgtaaacttggtctgacagttaccaatgcttaatcagtgaggcacctatctcagcgatctgtctatttcgttcatccatagttgcctgactccccgtcgtgtagataactacgatacgggagggcttaccatctggccccagtgctgcaatgataccgcgagacccacgctcaccggctccagatttatcagcaataaaccagccagccggaagggccgagcgcagaagtggtcctgcaactttatccgcctccatccagtctattaattgttgccgggaagctagagtaagtagttcgccagttaatagtttgcgcaacgttgttgccattgctacaggcatcgtggtgtcacgctcgtcgtttggtatggcttcattcagctccggttcccaacgatcaaggcgagttacatgatcccccatgttgtgcaaaaaagcggttagctccttcggtcctccgatcgttgtcagaagtaagttggccgcagtgttatcactcatggttatggcagcactgcataattctcttactgtcatgccatccgtaagatgcttttctgtgactggtgagtactcaaccaagtcattctgagaatagtgtatgcggcgaccgagttgctcttgcccggcgtcaatacgggataataccgcgccacatagcagaactttaaaagtgctcatcattggaaaacgttcttcggggcgaaaactctcaaggatcttaccgctgttgagatccagttcgatgtaacccactcgtgcacccaactgatcttcagcatcttttactttcaccagcgtttctgggtgagcaaaaacaggaaggcaaaatgccgcaaaaaagggaataagggcgacacggaaatgttgaatactcatactcttcctttttcaatattattgaagcatttatcagggttattgtctcatgagcggatacatatttgaatgtatttagaaaaataaacaaataggggttccgcgcacatttccccgaaaagtgccacctgacgtctaagaaaccattattatcatgacattaacctataaaaataggcgtatcacgaggccctttcgtcttcacctcgagaattgtgagcggataacaattgacattgtgagcggataacaagatactgagcacatcagcaggacgcactgaccgaattcattagtcgacattatgcggccgcggatccataaggaggattaattaagacttcccgggtgatcccatggtacgcgtgctagaggcatcaaataaaacgaaaggctcagtcgaaagactgggcctttcgttttatctgttgtttgtcggtgaacgctctcctgagtaggacaaatccgccgccctagacctaggcgttcggctgcggcgagcggtatcagctcactcaaaggcggtaatacggttatccacagaatcaggggataacgcaggaaagaacatgtgagcaaaaggccagcaaaaggccaggaaccgtaaaaaggccgcgttgctggcgtttttccataggctccgcccccctgacgagcatcacaaaaatcgacgctcaagtcagaggtggcgaaacccgacaggactataaagataccaggcgtttccccctggaagctccctcgtgcgctctcctgttccgaccctgccgcttaccggatacctgtccgcctttctcccttcgggaagcgtggcgctttctcaatgctcacgctgtaggtatctcagttcggtgtaggtcgttcgctccaagctgggctgtgtgcacgaaccccccgttcagcccgaccgctgcgccttatccggtaactatcgtcttgagtccaacccggtaagacacgacttatcgccactggcagcagccactggtaacaggattagcagagcgaggtatgtaggcggtgctacagagttcttgaagtggtggcctaactacggctacactagaaggacagtatttggtatctgcgctctgctgaagccagttaccttcggaaaaagagttggtagctcttgatccggcaaacaaaccaccgctggtagcggtggtttttttgtttgcaagcagcagattacgcgcagaaaaaaaggatctcaagaagatcctttgatcttttctacggggtctgacgctcagtggaacgaaaactcacgttaagggattttggtcatga

SEQ ID NO: 114 - DNA, 6416 bp, Artificial Sequence
  Plasmid pGV1716
taagaaaccattattatcatgacattaacctataaaaataggcgtatcacgaggccctttcgtcttcacctcgagaattgtgagcggataacaattgacattgtgagcggataacaagatactgagcacatcagcaggacgcactgaccgaattcattaaagaggagaaaggtacaatgttgacaaaagcaacaaaagaacaaaaatcccttgtgaaaaacagaggggcggagcttgttgttgattgcttagtggagcaaggtgtcacacatgtatttggcattccaggtgcaaaaattgatgcggtatttgacgctttacaagataaaggacctgaaattatcgttgcccggcacgaacaaaacgcagcattcatggcccaagcagtcggccgtttaactggaaaaccgggagtcgtgttagtcacatcaggaccgggtgcctctaacttggcaacaggcctgctgacagcgaacactgaaggagaccctgtcgttgcgcttgctggaaacgtgatccgtgcagatcgtttaaaacggacacatcaatctttggataatgcggcgctattccagccgattacaaaatacagtgtagaagttcaagatgtaaaaaatataccggaagctgttacaaatgcatttaggatagcgtcagcagggcaggctggggccgcttttgtgagctttccgcaagatgttgtgaatgaagtcacaaatacgaaaaacgtgcgtgctgttgcagcgccaaaactcggtcctgcagcagatgatgcaatcagtgcggccatagcaaaaatccaaacagcaaaacttcctgtcgttttggtcggcatgaaaggcggaagaccggaagcaattaaagcggttcgcaagcttttgaaaaaggttcagcttccatttgttgaaacatatcaagctgccggtaccctttctagagatttagaggatcaatattttggccgtatcggtttgttccgcaaccagcctggcgatttactgctagagcaggcagatgttgttctgacgatcggctatgacccgattgaatatgatccgaaattctggaatatcaatggagaccggacaattatccatttagacgagattatcgctgacattgatcatgcttaccagcctgatcttgaattgatcggtgacattccgtccacgatcaatcatatcgaacacgatgctgtgaaagtggaatttgcagagcgtgagcagaaaatcctttctgatttaaaacaatatatgcatgaaggtgagcaggtgcctgcagattggaaatcagacagagcgcaccctcttgaaatcgttaaagagttgcgtaatgcagtcgatgatcatgttacagtaacttgcgatatcggttcgcacgccatttggatgtcacgttatttccgcagctacgagccgttaacattaatgatcagtaacggtatgcaaacactcggcgttgcgcttccttgggcaatcggcgcttcattggtgaaaccgggagaaaaagtggtttctgtctctggtgacggcggtttcttattctcagcaatggaattagagacagcagttcgactaaaagcaccaattgtacacattgtatggaacgacagcacatatgacatggttgcattccagcaattgaaaaaatataaccgtacatctgcggtcgatttcggaaatatcgatatcgtgaaatatgcggaaagcttcggagcaactggcttgcgcgtagaatcaccagaccagctggcagatgttctgcgtcaaggcatgaacgctgaaggtcctgtcatcatcgatgtcccggttgactacagtgataacattaatttagcaagtgacaagcttccgaaagaattcggggaactcatgaaaacgaaagctctctaggtcgacggatccaggagacaacattatgtctattccagaaactcaaaaagcgattattttctacgagtccaacggcaaactggaacacaaagatatcccggtgccgaaaccgaagccgaacgagctgctgattaacgtaaaatactctggtgtgtgccacactgatctgcacgcttggcacggtgattggcctctgccgaccaaactgccgctggttggtggtcatgagggtgcgggcgttgtagtaggcatgggtgaaaacgtgaagggctggaaaatcggtgactacgcaggtatcaagtggctgaacggttcttgcatggcctgcgaatactgcgagctgggtaacgaatctaactgcccgcacgcagacctgtctggctatacccatgatggttcctttcaggaatacgctactgcagacgcagtgcaggctgcacatattccacagggcaccgatctggcggaggtagctcctattctgtgcgctggtattacggtttacaaggcgctgaaaagcgccaacctgcgtgccggccactgggcagcgatctctggtgcggcaggcggtctgggttctctggcagtccaatatgcaaaagcgatgggttaccgcgttctgggcatcgacggtggtccgggtaaggaggaactgttcacttctctgggcggcgaggtgtttatcgacttcactaaggagaaagatatcgtttccgcggttgttaaagcgaccaacggtggcgcgcacggcattatcaacgtatctgtgtccgaggctgcaatcgaggcgtctactcgttactgccgtgctaacggcactgtggtcctggtaggtctgccggctggtgctaaatgttctagcgatgttttcaaccacgtagtaaaaagcatcagcatcgtgggttcctacgttggcaaccgtgcagacactcgtgaggctctggacttcttcgcacgcggcctggtgaaatctccgattaaggttgttggtctgtctagcctgccggaaatctatgagaaaatggaaaaaggtcagattgcgggccgttacgtggtggacacctctaaataagcggccgcgtcgacgaggagacaacattatggcgaattatttcaacactctgaacctgcgtcaacaactggcgcaactgggtaagtgccgtttcatgggtcgtgacgagtttgcggacggtgcttcttatctgcaaggcaagaaggttgttattgttggttgcggtgcgcaaggcctgaatcaaggtctgaatatgcgcgacagcggcctggacattagctatgcgctgcgcaaggaggctatcgcggaaaaacgtgctagctggcgcaaggctactgagaacggcttcaaggttggcacctatgaggagctgattccgcaagctgacctggttatcaatctgaccccagataaacaacatagcgacgttgttcgtactgttcaaccgctgatgaaggatggtgctgctctgggttatagccacggctttaacattgttgaggtaggtgaacaaattcgcaaggacattactgttgttatggtggctccaaagtgtccgggtactgaggttcgcgaggaatataagcgcggttttggtgttccaaccctgatcgcggtgcatccagagaatgacccaaagggtgagggtatggctatcgcgaaggcgtgggctgcggcgactggcggccatcgcgctggcgttctggagagcagctttgtggctgaggttaagagcgatctgatgggtgaacagactattctgtgtggtatgctgcaagcgggtagcctgctgtgttttgataaactggttgaggagggcactgacccggcgtatgcggagaagctgatccaatttggctgggagactattactgaggcgctgaagcaaggtggtattactctgatgatggatcgcctgagcaatccagctaagctgcgcgcgtacgctctgagcgagcaactgaaggaaattatggcaccgctgtttcaaaagcacatggatgatatcattagcggtgagtttagcagcggcatgatggctgattgggcgaatgacgacaaaaagctgctgacttggcgcgaggaaactggtaagactgctttcgagactgctccacaatacgagggtaagattggtgaacaagaatattttgacaagggtgttctgatgatcgctatggttaaggctggtgtggagctggcttttgagactatggttgacagcggtattatcgaggaaagcgcgtactacgagagcctgcatgaactgccactgatcgcgaatactattgcgcgcaaacgcctgtatgagatgaatgttgtgattagcgacactgcggaatatggcaattacctgtttagctatgcgtgcgttccactgctgaagccattcatggcggaactgcagccaggtgatctgggcaaggcgatcccagagggtgctgttgacaatggtcagctgcgcgacgttaatgaggctatccgttctcacgctatcgaacaagttggcaaaaagctgcgtggttacatgaccgacatgaagcgcatcgcggtggctggctaacctagggcgttcggctgcggcgagcggtatcagctcactcaaaggcggtaatacggttatccacagaatcaggggataacgcaggaaagaacatgtgagcaaaaggccagcaaaaggccaggaaccgtaaaaaggccgcgttgctggcgtttttccataggctccgcccccctgacgagcatcacaaaaatcgacgctcaagtcagaggtggcgaaacccgacaggactataaagataccaggcgtttccccctggaagctccctcgtgcgctctcctgttccgaccctgccgcttaccggatacctgtccgcctttctcccttcgggaagcgtggcgctttctcatagctcacgctgtaggtatctcagttcggtgtaggtcgttcgctccaagctgggctgtgtgcacgaaccccccgttcagcccgaccgctgcgccttatccggtaactatcgtcttgagtccaacccggtaagacacgacttatcgccactggcagcagccactggtaacaggattagcagagcgaggtatgtaggcggtgctacagagttcttgaagtggtggcctaactacggctacactagaaggacagtatttggtatctgcgctctgctgaagccagttaccttcggaaaaagagttggtagctcttgatccggcaaacaaaccaccgctggtagcggtggtttttttgtttgcaagcagcagattacgcgcagaaaaaaaggatctcaagaagatcctttgatcttttctacggggtctgacgctcagtggaacgaaaactcacgttaagggattttggtcatgactagtgcttggattctcaccaataaaaaacgcccggcggcaaccgagcgttctgaacaaatccagatggagttctgaggtcattactggatctatcaacaggagtccaagcgagctcgtaaacttggtctgacagttaccaatgcttaatcagtgaggcacctatctcagcgatctgtctatttcgttcatccatagttgcctgactccccgtcgtgtagataactacgatacgggagggcttaccatctggccccagtgctgcaatgataccgcgagacccacgctcaccggctccagatttatcagcaataaaccagccagccggaagggccgagcgcagaagtggtcctgcaactttatccgcctccatccagtctattaattgttgccgggaagctagagtaagtagttcgccagttaatagtttgcgcaacgttgttgccattgctacaggcatcgtggtgtcacgctcgtcgtttggtatggcttcattcagctccggttcccaacgatcaaggcgagttacatgatcccccatgttgtgcaaaaaagcggttagctccttcggtcctccgatcgttgtcagaagtaagttggccgcagtgttatcactcatggttatggcagcactgcataattctcttactgtcatgccatccgtaagatgcttttctgtgactggtgagtactcaaccaagtcattctgagaatagtgtatgcggcgaccgagttgctcttgcccggcgtcaatacgggataataccgcgccacatagcagaactttaaaagtgctcatcattggaaaacgttcttcggggcgaaaactctcaaggatcttaccgctgttgagatccagttcgatgtaacccactcgtgcacccaactgatcttcagcatcttttactttcaccagcgtttctgggtgagcaaaaacaggaaggcaaaatgccgcaaaaaagggaataagggcgacacggaaatgttgaatactcatactcttcctttttcaatattattgaagcatttatcagggttattgtctcatgagcggatacatatttgaatgtatttagaaaaataaacaaataggggttccgcgcacatttccccgaaaagtgccacctgacgtc

SEQ ID NO: 115 - DNA, 3644 bp, Artificial Sequence
  Plasmid pGV1720
taagaaaccattattatcatgacattaacctataaaaataggcgtatcacgaggccctttcgtcttcacctcgagaattgtgagcggataacaattgacattgtgagcggataacaagatactgagcacatcagcaggacgcactgaccgaattcattagtcgacattatgcggccgcggatccataaggaggattaattaagacttcccgggtgatcccatggtacgcgtgctagaggcatcaaataaaacgaaaggctcagtcgaaagactgggcctttcgttttatctgttgtttgtcggtgaacgctctcctgagtaggacaaatccgccgccctagacctagctagggtacgggttttgctgcccgcaaacgggctgttctggtgttgctagtttgttatcagaatcgcagatccggcttcagccggtttgccggctgaaagcgctatttcttccagaattgccatgattttttccccacgggaggcgtcactggctcccgtgttgtcggcagctttgattcgataagcagcatcgcctgtttcaggctgtctatgtgtgactgttgagctgtaacaagttgtctcaggtgttcaatttcatgttctagttgctttgttttactggtttcacctgttctattaggtgttacatgctgttcatctgttacattgtcgatctgttcatggtgaacagctttaaatgcaccaaaaactcgtaaaagctctgatgtatctatcttttttacaccgttttcatctgtgcatatggacagttttccctttgatatctaacggtgaacagttgttctacttttgtttgttagtcttgatgcttcactgatagatacaagagccataagaacctcagatccttccgtatttagccagtatgttctctagtgtggttcgttgtttttgcgtgagccatgagaacgaaccattgagatcatgcttactttgcatgtcactcaaaaattttgcctcaaaactggtgagctgaatttttgcagttaaagcatcgtgtagtgtttttcttagtccgttacgtaggtaggaatctgatgtaatggttgttggtattttgtcaccattcatttttatctggttgttctcaagttcggttacgagatccatttgtctatctagttcaacttggaaaatcaacgtatcagtcgggcggcctcgcttatcaaccaccaatttcatattgctgtaagtgtttaaatctttacttattggtttcaaaacccattggttaagccttttaaactcatggtagttattttcaagcattaacatgaacttaaattcatcaaggctaatctctatatttgccttgtgagttttcttttgtgttagttcttttaataaccactcataaatcctcatagagtatttgttttcaaaagacttaacatgttccagattatattttatgaatttttttaactggaaaagataaggcaatatctcttcactaaaaactaattctaatttttcgcttgagaacttggcatagtttgtccactggaaaatctcaaagcctttaaccaaaggattcctgatttccacagttctcgtcatcagctctctggttgctttagctaatacaccataagcattttccctactgatgttcatcatctgagcgtattggttataagtgaacgataccgtccgttctttccttgtagggttttcaatcgtggggttgagtagtgccacacagcataaaattagcttggtttcatgctccgttaagtcatagcgactaatcgctagttcatttgctttgaaaacaactaattcagacatacatctcaattggtctaggtgattttaatcactataccaattgagatgggctagtcaatgataattactagtccttttcccgggagatctgggtatctgtaaattctgctagacctttgctggaaaacttgtaaattctgctagaccctctgtaaattccgctagacctttgtgtgttttttttgtttatattcaagtggttataatttatagaataaagaaagaataaaaaaagataaaaagaatagatcccagccctgtgtataactcactactttagtcagttccgcagtattacaaaaggatgtcgcaaacgctgtttgctcctctacaaaacagaccttaaaaccctaaaggcttaagtagcaccctcgcaagctcgggcaaatcgctgaatattccttttgtctccgaccatcaggcacctgagtcgctgtctttttcgtgacattcagttcgctgcgctcacggctctggcagtgaatgggggtaaatggcactacaggcgccttttatggattcatgcaaggaaactacccataatacaagaaaagcccgtcacgggcttctcagggcgttttatggcgggtctgctatgtggtgctatctgactttttgctgttcagcagttcctgccctctgattttccagtctgaccacttcggattatcccgtgacaggtcattcagactggctaatgcacccagtaaggcagcggtatcatcaacaggcttacccgtcttactgtccctagtgcttggattctcaccaataaaaaacgcccggcggcaaccgagcgttctgaacaaatccagatggagttctgaggtcattactggatctatcaacaggagtccaagcgagctctcgaaccccagagtcccgctcagaagaactcgtcaagaaggcgatagaaggcgatgcgctgcgaatcgggagcggcgataccgtaaagcacgaggaagcggtcagcccattcgccgccaagctcttcagcaatatcacgggtagccaacgctatgtcctgatagcggtccgccacacccagccggccacagtcgatgaatccagaaaagcggccattttccaccatgatattcggcaagcaggcatcgccatgggtcacgacgagatcctcgccgtcgggcatgcgcgccttgagcctggcgaacagttcggctggcgcgagcccctgatgctcttcgtccagatcatcctgatcgacaagaccggcttccatccgagtacgtgctcgctcgatgcgatgtttcgcttggtggtcgaatgggcaggtagccggatcaagcgtatgcagccgccgcattgcatcagccatgatggatactttctcggcaggagcaaggtgagatgacaggagatcctgccccggcacttcgcccaatagcagccagtcccttcccgcttcagtgacaacgtcgagcacagctgcgcaaggaacgcccgtcgtggccagccacgatagccgcgctgcctcgtcctgcagttcattcagggcaccggacaggtcggtcttgacaaaaagaaccgggcgcccctgcgctgacagccggaacacggcggcatcagagcagccgattgtctgttgtgcccagtcatagccgaatagcctctccacccaagcggccggagaacctgcgtgcaatccatcttgttcaatcatgcgaaacgatcctcatcctgtctcttgatcagatcttgatcccctgcgccatcagatccttggcggcaagaaagccatccagtttactttgcagggcttcccaaccttaccagagggcgccccagctggcaattccgacgtc

SEQ ID NO: 116 - DNA, 6654 bp, Artificial Sequence
  Plasmid pGV1730
caggcaagtgcacaaacaatacttaaataaatactactcagtaataacctatttcttagcatttttgacgaaatttgctattttgttagagtcttttacaccatttgtctccacacctccgcttacatcaacaccaataacgccatttaatctaagcgcatcaccaacattttctggcgtcagtccaccagctaacataaaatgtaagctttcggggctctcttgccttccaacccagtcagaaatcgagttccaatccaaaagttcacctgtcccacctgcttctgaatcaaacaagggaataaacgaatgaggtttctgtgaagctgcactgagtagtatgttgcagtcttttggaaatacgagtcttttaataactggcaaaccgaggaactcttggtattcttgccacgactcatctccatgcagttggacgatatcaatgccgtaatcattgaccagagccaaaacatcctccttaggttgattacgaaacacgccaaccaagtatttcggagtgcctgaactatttttatatgcttttacaagacttgaaattttccttgcaataaccgggtcaattgttctctttctattgggcacacatataatacccagcaagtcagcatcggaatctagagcacattctgcggcctctgtgctctgcaagccgcaaactttcaccaatggaccagaactacctgtgaaattaataacagacatactccaagctgcctttgtgtgcttaatcacgtatactcacgtgctcaatagtcaccaatgccctccctcttggccctctccttttcttttttcgaccgaattaattcttaatcggcaaaaaaagaaaagctccggatcaagattgtacgtaaggtgacaagctatttttcaataaagaatatcttccactactgccatctggcgtcataactgcaaagtacacatatattacgatgctgtctattaaatgcttcctatattatatatatagtaatgtcgttgacgtcgccggcaggagagtgaaagagccttgtttatatatttttttttcctatgttcaacgaggacagctaggtttatgcaaaaatgtgccatcaccataagctgattcaaatgagctaaaaaaaaaatagttagaaaataaggtggtgttgaacgatagcaagtagatcaagacaccgtctaacagaaaaaggggcagcggacaatattatgcaattatgaagaaaagtactcaaagggtcggaaaaatattcaaacgatatttgcattaaatcctcaattgattgattattccatagtaaaataccgtaacaacacaaaattgttctcaaattcataaattattcattttttccacgagcctcatcacacgaaaagtcagaagagcatacataatcttttaaatgcataggttatgcattttgcaaatgccaccaggcaacaaaaatatgcgtttagcgggcggaatcgggaaggaagccggaaccaccaaaaactggaagctacgtttttaaggaaggtatgggtgcagtgtgcttatctcaagaaatattagttatgatataaggtgttgaagtttagagataggtaaataaacgcggggtgtgtttattacatgaagaagaagttagtttctgccttgcttgtttatcttgcacatcacatcagcggaacatatgctcacccagtcgcgacatccaatttatagaaatcagcttgtgggtattgttcagagaatttttcaatcattggagcaatcattttacatggaccgcaccaagtggcgtagaaatctacgacaactagcttgtcttgagcaattgcagagtcgaattcgctggcagttttgaattgagtaaccattatttgtatcgaggtgtctagtcttctattacactaatgcagtttcagggttttggaaaccacactgtttaaacagtgttccttaatcaaggatacctctttttttttccttggttccactaattcatcggttttttttttggaagacatcttttccaacgaaaagaatatacatatcgtttaagagaaattctccaaatttgtaaagaagcggacccagacttaagcctaaccaggccaattcaacagactgtcggcaacttcttgtctggtctttccatggtaagtgacagtgcagtaataatatgaaccaatttatttttcgttacataaaaatgcttataaaactttaactaataattagagattaaatcgcggccgcggatccctagagagctttcgttttcatgagttccccgaattctttcggaagcttgtcacttgctaaattaacgttatcactgtagtcaaccgggacatcaatgatgacaggcccctcagcgttcatgccttgacgcagaacatctgccagctggtctggtgattctacgcgtaagccagttgctccgaagctttccgcgtatttcacgatatcgatatttccgaaatcgaccgcagatgtacgattatattttttcaattgctggaatgcaaccatgtcatatgtgctgtcgttccatacaatgtgtacaattggtgcttttaaacgaactgctgtctctaattccatagctgagaataagaaaccgccatcaccggagactgatactactttttctcccggtttcaccaatgaagcgccgattgcccaaggaagcgcaacgccgagtgtttgcataccgttactaatcattaatgttaacggctcgtagctgcggaaataacgtgacatccaaatcgcgtgtgaaccgatatcgcaagtcactgtaacatgatcatcgactgcgtttcgcaattctttaacgatttcaagaggatgcactctgtctgatttccaatctgcaggcacctgctcaccctcatgcatatattgttttaaatcagaaaggatcttctgctcacgttccgcaaagtctactttcacagcatcgtgttcgatatgattgatcgtagatggaatatcaccgatcagttcaagatccggctggtaagcatgatcaatgtcagccagaatctcgtctaaatggatgatcgtccggtctccattgacattccagaatttcggatcatattcaattgggtcatagccgattgtcagaacaacatcagcctgctcaagcagcagatcgccaggctggttgcggaataaaccgatccggccaaaatactgatcctctaaatctctcgtaagagtaccggcagcttgatatgtttcaacgaatggaagctgcacttttttcaatagcttgcgaaccgctttaatcgcttccggtcttccgcccttcatgccgactaaaacgacaggaagttttgctgtttgaatttttgcaatggccatactgattgcgtcatctgctgcgggaccaagttttggcgctgcgacagcacgtacgttttttgtatttgtgacttcattcacaacatcttgcggaaaactcacaaaagcggccccagcctgccctgctgacgctatcctaaacgcatttgtaacagcttccggtatattttttacatcttgaacttctacactgtattttgtaatcggctggaatagcgccgcattatccaaagattgatgtgtccgttttaaacgatctgcacggatcacgttcccagcaagcgcaacgacagggtcaccttcagtgtttgctgtcagcagtcctgttgccaagttcgaagcacctggtcctgatgtgactaacacgactcccggttttccagttaaacggccgactgcttgcgccataaatgctgcattttgttcatgccgggcaacgataatttcaggccctttatcttgtaaagcgtcaaataccgcatcaatttttgcacctggaatgccaaatacatgtgtgacaccttgctccgctaagcaatcaacaacaagctccgcccctctgcttttcacaagggatttttgttcttttgttgcttttgtcaacatgtcgactttatgtgatgattgattgattgattgtacagtttgtttttcttaatatctatttcgatgacttctatatgatattgcactaacaagaagatattataatgcaattgatacaagacaaggagttatttgcttctcttttatatgattctgacaatccatattgcgttggtagtcttttttgctggaacggttcagcggaaaagacgcatcgctctttttgcttctagaagaaatgccagcaaaagaatctcttgacagtgactgacagcaaaaatgtctttttctaactagtaacaaggctaagatatcagcctgaaataaagggtggtgaagtaataattaaatcatccgtataaacctatacacatatatgaggaaaaataatacaaaagtgttttaaatacagatacatacatgaacatatgcacgtatagcgcccaaatgtcggtaatgggatcggcgagctccagcttttgttccctttagtgagggttaattgcgcgcttggcgtaatcatggtcatagctgtttcctgtgtgaaattgttatccgctcacaattccacacaacataggagccggaagcataaagtgtaaagcctggggtgcctaatgagtgaggtaactcacattaattgcgttgcgctcactgcccgctttccagtcgggaaacctgtcgtgccagctgcattaatgaatcggccaacgcgcggggagaggcggtttgcgtattgggcgctcttccgcttcctcgctcactgactcgctgcgctcggtcgttcggctgcggcgagcggtatcagctcactcaaaggcggtaatacggttatccacagaatcaggggataacgcaggaaagaacatgtgagcaaaaggccagcaaaaggccaggaaccgtaaaaaggccgcgttgctggcgtttttccataggctccgcccccctgacgagcatcacaaaaatcgacgctcaagtcagaggtggcgaaacccgacaggactataaagataccaggcgtttccccctggaagctccctcgtgcgctctcctgttccgaccctgccgcttaccggatacctgtccgcctttctcccttcgggaagcgtggcgctttctcatagctcacgctgtaggtatctcagttcggtgtaggtcgttcgctccaagctgggctgtgtgcacgaaccccccgttcagcccgaccgctgcgccttatccggtaactatcgtcttgagtccaacccggtaagacacgacttatcgccactggcagcagccactggtaacaggattagcagagcgaggtatgtaggcggtgctacagagttcttgaagtggtggcctaactacggctacactagaaggacagtatttggtatctgcgctctgctgaagccagttaccttcggaaaaagagttggtagctcttgatccggcaaacaaaccaccgctggtagcggtggtttttttgtttgcaagcagcagattacgcgcagaaaaaaaggatctcaagaagatcctttgatcttttctacggggtctgacgctcagtggaacgaaaactcacgttaagggattttggtcatgagattatcaaaaaggatcttcacctagatccttttaaattaaaaatgaagttttaaatcaatctaaagtatatatgagtaaacttggtctgacagttaccaatgcttaatcagtgaggcacctatctcagcgatctgtctatttcgttcatccatagttgcctgactccccgtcgtgtagataactacgatacgggagggcttaccatctggccccagtgctgcaatgataccgcgagacccacgctcaccggctccagatttatcagcaataaaccagccagccggaagggccgagcgcagaagtggtcctgcaactttatccgcctccatccagtctattaattgttgccgggaagctagagtaagtagttcgccagttaatagtttgcgcaacgttgttgccattgctacaggcatcgtggtgtcacgctcgtcgtttggtatggcttcattcagctccggttcccaacgatcaaggcgagttacatgatcccccatgttgtgcaaaaaagcggttagctccttcggtcctccgatcgttgtcagaagtaagttggccgcagtgttatcactcatggttatggcagcactgcataattctcttactgtcatgccatccgtaagatgcttttctgtgactggtgagtactcaaccaagtcattctgagaatagtgtatgcggcgaccgagttgctcttgcccggcgtcaatacgggataataccgcgccacatagcagaactttaaaagtgctcatcattggaaaacgttcttcggggcgaaaactctcaaggatcttaccgctgttgagatccagttcgatgtaacccactcgtgcacccaactgatcttcagcatcttttactttcaccagcgtttctgggtgagcaaaaacaggaaggcaaaatgccgcaaaaaagggaataagggcgacacggaaatgttgaatactcatactcttcctttttcaatattattgaagcatttatcagggttattgtctcatgagcggatacatatttgaatgtatttagaaaaataaacaaataggggttccgcgcacatttccccgaaaagtgccacctgacgt

SEQ ID NO: 117 - DNA, 6597 bp, Artificial Sequence
  Plasmid pGV1745
taagaaaccattattatcatgacattaacctataaaaataggcgtatcacgaggccctttcgtcttcacctcgagaattgtgagcggataacaattgacattgtgagcggataacaagatactgagcacatcagcaggacgcactgaccgaattcattagtcgacaggagaaaggtactatgcgaattggcataccaagagaacggttaaccaatgaaacccgtgttgcagcaacgccaaaaacagtggaacagctgctgaaactgggttttaccgtcgcggtagagagcggcgcgggtcaactggcaagttttgacgataaagcgtttgtgcaagcgggcgctgaaattgtagaagggaatagcgtctggcagtcagagatcattctgaaggtcaatgcgccgttagatgatgaaattgcgttactgaatcctgggacaacgctggtgagttttatctggcctgcgcagaatccggaattaatgcaaaaacttgcggaacgtaacgtgaccgtgatggcgatggactctgtgccgcgtatctcacgcgcacaatcgctggacgcactaagctcgatggcgaacatcgccggttatcgcgccattgttgaagcggcacatgaatttgggcgcttctttaccgggcaaattactgcggccgggaaagtgccaccggcaaaagtgatggtgattggtgcgggtgttgcaggtctggccgccattggcgcagcaaacagtctcggcgcgattgtgcgtgcattcgacacccgcccggaagtgaaagaacaagttcaaagtatgggcgcggaattcctcgagctggattttaaagaggaagctggcagcggcgatggctatgccaaagtgatgtcggacgcgttcatcaaagcggaaatggaactctttgccgcccaggcaaaagaggtcgatatcattgtcaccaccgcgcttattccaggcaaaccagcgccgaagctaattacccgtgaaatggttgactccatgaaggcgggcagtgtgattgttgacctggcagcccaaaacggcggcaactgtgaatacaccgtgccgggtgaaatcttcactacggaaaatggtgtcaaagtgattggttataccgatcttccgggccgtctgccgacgcaatcctcacagctttacggcacaaacctcgttaatctgctgaaactgttgtgcaaagagaaagacggcaatatcactgttgattttgatgatgtggtgattcgcggcgtgaccgtgatccgtgcgggcgaaattacctggccggcaccgccgattcaggtatcagctcagccgcaggcggcacaaaaagcggcaccggaagtgaaaactgaggaaaaatgtacctgctcaccgtggcgtaaatacgcgttgatggcgctggcaatcattctttttggctggatggcaagcgttgcgccgaaagaattccttgggcacttcaccgttttcgcgctggcctgcgttgtcggttattacgtggtgtggaatgtatcgcacgcgctgcatacaccgttgatgtcggtcaccaacgcgatttcagggattattgttgtcggagcactgttgcagattggccagggcggctgggttagcttccttagttttatcgcggtgcttatagccagcattaatattttcggtggcttcaccgtgactcagcgcatgctgaaaatgttccgcaaaaattaaggggtaacatatgtctggaggattagttacagctgcatacattgttgccgcgatcctgtttatcttcagtctggccggtctttcgaaacatgaaacgtctcgccagggtaacaacttcggtatcgccgggatggcgattgcgttaatcgcaaccatttttggaccggatacgggtaatgttggctggatcttgctggcgatggtcattggtggggcaattggtatccgtctggcgaagaaagttgaaatgaccgaaatgccagaactggtggcgatcctgcatagcttcgtgggtctggcggcagtgctggttggctttaacagctatctgcatcatgacgcgggaatggcaccgattctggtcaatattcacctgacggaagtgttcctcggtatcttcatcggggcggtaacgttcacgggttcggtggtggcgttcggcaaactgtgtggcaagatttcgtctaaaccattgatgctgccaaaccgtcacaaaatgaacctggcggctctggtcgtttccttcctgctgctgattgtatttgttcgcacggacagcgtcggcctgcaagtgctggcattgctgataatgaccgcaattgcgctggtattcggctggcatttagtcgcctccatcggtggtgcagatatgccagtggtggtgtcgatgctgaactcgtactccggctgggcggctgcggctgcgggctttatgctcagcaacgacctgctgattgtgaccggtgcgctggtcggttcttcgggggctatcctttcttacattatgtgtaaggcgatgaaccgttcctttatcagcgttattgcgggtggtttcggcaccgacggctcttctactggcgatgatcaggaagtgggtgagcaccgcgaaatcaccgcagaagagacagcggaactgctgaaaaactcccattcagtgatcattactccggggtacggcatggcagtcgcgcaggcgcaatatcctgtcgctgaaattactgagaaattgcgcgctcgtggtattaatgtgcgtttcggtatccacccggtcgcggggcgtttgcctggacatatgaacgtattgctggctgaagcaaaagtaccgtatgacatcgtgctggaaatggacgagatcaatgatgactttgctgataccgataccgtactggtgattggtgctaacgatacggttaacccggcggcgcaggatgatccgaagagtccgattgctggtatgcctgtgctggaagtgtggaaagcgcagaacgtgattgtctttaaacgttcgatgaacactggctatgctggtgtgcaaaacccgctgttcttcaaggaaaacacccacatgctgtttggtgacgccaaagccagcgtggatgcaatcctgaaagctctgtaacgtcgacattatgcggccgcggatccataaggaggattaattaagacttcccgggtgatcccatggtacgcgtgctagaggcatcaaataaaacgaaaggctcagtcgaaagactgggcctttcgttttatctgttgtttgtcggtgaacgctctcctgagtaggacaaatccgccgccctagacctagctagggtacgggttttgctgcccgcaaacgggctgttctggtgttgctagtttgttatcagaatcgcagatccggcttcagccggtttgccggctgaaagcgctatttcttccagaattgccatgattttttccccacgggaggcgtcactggctcccgtgttgtcggcagctttgattcgataagcagcatcgcctgtttcaggctgtctatgtgtgactgttgagctgtaacaagttgtctcaggtgttcaatttcatgttctagttgctttgttttactggtttcacctgttctattaggtgttacatgctgttcatctgttacattgtcgatctgttcatggtgaacagctttaaatgcaccaaaaactcgtaaaagctctgatgtatctatcttttttacaccgttttcatctgtgcatatggacagttttccctttgatatctaacggtgaacagttgttctacttttgtttgttagtcttgatgcttcactgatagatacaagagccataagaacctcagatccttccgtatttagccagtatgttctctagtgtggttcgttgtttttgcgtgagccatgagaacgaaccattgagatcatgcttactttgcatgtcactcaaaaattttgcctcaaaactggtgagctgaatttttgcagttaaagcatcgtgtagtgtttttcttagtccgttacgtaggtaggaatctgatgtaatggttgttggtattttgtcaccattcatttttatctggttgttctcaagttcggttacgagatccatttgtctatctagttcaacttggaaaatcaacgtatcagtcgggcggcctcgcttatcaaccaccaatttcatattgctgtaagtgtttaaatctttacttattggtttcaaaacccattggttaagccttttaaactcatggtagttattttcaagcattaacatgaacttaaattcatcaaggctaatctctatatttgccttgtgagttttcttttgtgttagttcttttaataaccactcataaatcctcatagagtatttgttttcaaaagacttaacatgttccagattatattttatgaatttttttaactggaaaagataaggcaatatctcttcactaaaaactaattctaatttttcgcttgagaacttggcatagtttgtccactggaaaatctcaaagcctttaaccaaaggattcctgatttccacagttctcgtcatcagctctctggttgctttagctaatacaccataagcattttccctactgatgttcatcatctgagcgtattggttataagtgaacgataccgtccgttctttccttgtagggttttcaatcgtggggttgagtagtgccacacagcataaaattagcttggtttcatgctccgttaagtcatagcgactaatcgctagttcatttgctttgaaaacaactaattcagacatacatctcaattggtctaggtgattttaatcactataccaattgagatgggctagtcaatgataattactagtccttttcccgggagatctgggtatctgtaaattctgctagacctttgctggaaaacttgtaaattctgctagaccctctgtaaattccgctagacctttgtgtgttttttttgtttatattcaagtggttataatttatagaataaagaaagaataaaaaaagataaaaagaatagatcccagccctgtgtataactcactactttagtcagttccgcagtattacaaaaggatgtcgcaaacgctgtttgctcctctacaaaacagaccttaaaaccctaaaggcttaagtagcaccctcgcaagctcgggcaaatcgctgaatattccttttgtctccgaccatcaggcacctgagtcgctgtctttttcgtgacattcagttcgctgcgctcacggctctggcagtgaatgggggtaaatggcactacaggcgccttttatggattcatgcaaggaaactacccataatacaagaaaagcccgtcacgggcttctcagggcgttttatggcgggtctgctatgtggtgctatctgactttttgctgttcagcagttcctgccctctgattttccagtctgaccacttcggattatcccgtgacaggtcattcagactggctaatgcacccagtaaggcagcggtatcatcaacaggcttacccgtcttactgtccctagtgcttggattctcaccaataaaaaacgcccggcggcaaccgagcgttctgaacaaatccagatggagttctgaggtcattactggatctatcaacaggagtccaagcgagctctcgaaccccagagtcccgctcagaagaactcgtcaagaaggcgatagaaggcgatgcgctgcgaatcgggagcggcgataccgtaaagcacgaggaagcggtcagcccattcgccgccaagctcttcagcaatatcacgggtagccaacgctatgtcctgatagcggtccgccacacccagccggccacagtcgatgaatccagaaaagcggccattttccaccatgatattcggcaagcaggcatcgccatgggtcacgacgagatcctcgccgtcgggcatgcgcgccttgagcctggcgaacagttcggctggcgcgagcccctgatgctcttcgtccagatcatcctgatcgacaagaccggcttccatccgagtacgtgctcgctcgatgcgatgtttcgcttggtggtcgaatgggcaggtagccggatcaagcgtatgcagccgccgcattgcatcagccatgatggatactttctcggcaggagcaaggtgagatgacaggagatcctgccccggcacttcgcccaatagcagccagtcccttcccgcttcagtgacaacgtcgagcacagctgcgcaaggaacgcccgtcgtggccagccacgatagccgcgctgcctcgtcctgcagttcattcagggcaccggacaggtcggtcttgacaaaaagaaccgggcgcccctgcgctgacagccggaacacggcggcatcagagcagccgattgtctgttgtgcccagtcatagccgaatagcctctccacccaagcggccggagaacctgcgtgcaatccatcttgttcaatcatgcgaaacgatcctcatcctgtctcttgatcagatcttgatcccctgcgccatcagatccttggcggcaagaaagccatccagtttactttgcagggcttcccaaccttaccagagggcgccccagctggcaattccgacgtc

SEQ ID NO: 118 - DNA, 3625 bp, Artificial Sequence
  Plasmid pGV1777
taagaaaccattattatcatgacattaacctataaaaataggcgtatcacgaggccctttcgtcttcacctcgagaattgtgagcggataacaattgacattgtgagcggataacaagatactgagcacatcagcaggacgcactgaccgaattcattaaagaggagaaaggtacctgcacgtcgacgaggagacaacattatggcgaattatttcaacactctgaacctgcgtcaacaactggcgcaactgggtaagtgccgtttcatgggtcgtgacgagtttgcggacggtgcttcttatctgcaaggcaagaaggttgttattgttggttgcggtgcgcaaggcctgaatcaaggtctgaatatgcgcgacagcggcctggacattagctatgcgctgcgcaaggaggctatcgcggaaaaacgtgctagctggcgcaaggctactgagaacggcttcaaggttggcacctatgaggagctgattccgcaagctgacctggttatcaatctgaccccagataaacaacatagcgacgttgttcgtactgttcaaccgctgatgaaggatggtgctgctctgggttatagccacggctttaacattgttgaggtaggtgaacaaattcgcaaggacattactgttgttatggtggctccaaagtgtccgggtactgaggttcgcgaggaatataagcgcggttttggtgttccaaccctgatcgcggtgcatccagagaatgacccaaagggtgagggtatggctatcgcgaaggcgtgggctgcggcgactggcggccatcgcgctggcgttctggagagcagctttgtggctgaggttaagagcgatctgatgggtgaacagactattctgtgtggtatgctgcaagcgggtagcctgctgtgttttgataaactggttgaggagggcactgacccggcgtatgcggagaagctgatccaatttggctgggagactattactgaggcgctgaagcaaggtggtattactctgatgatggatcgcctgagcaatccagctaagctgcgcgcgtacgctctgagcgagcaactgaaggaaattatggcaccgctgtttcaaaagcacatggatgatatcattagcggtgagtttagcagcggcatgatggctgattgggcgaatgacgacaaaaagctgctgacttggcgcgaggaaactggtaagactgctttcgagactgctccacaatacgagggtaagattggtgaacaagaatattttgacaagggtgttctgatgatcgctatggttaaggctggtgtggagctggcttttgagactatggttgacagcggtattatcgaggaaagcgcgtactacgagagcctgcatgaactgccactgatcgcgaatactattgcgcgcaaacgcctgtatgagatgaatgttgtgattagcgacactgcggaatatggcaattacctgtttagctatgcgtgcgttccactgctgaagccattcatggcggaactgcagccaggtgatctgggcaaggcgatcccagagggtgctgttgacaatggtcagctgcgcgacgttaatgaggctatccgttctcacgctatcgaacaagttggcaaaaagctgcgtggttacatgaccgacatgaagcgcatcgcggtggctggctaacctagggcgttcggctgcggcgagcggtatcagctcactcaaaggcggtaatacggttatccacagaatcaggggataacgcaggaaagaacatgtgagcaaaaggccagcaaaaggccaggaaccgtaaaaaggccgcgttgctggcgtttttccataggctccgcccccctgacgagcatcacaaaaatcgacgctcaagtcagaggtggcgaaacccgacaggactataaagataccaggcgtttccccctggaagctccctcgtgcgctctcctgttccgaccctgccgcttaccggatacctgtccgcctttctcccttcgggaagcgtggcgctttctcatagctcacgctgtaggtatctcagttcggtgtaggtcgttcgctccaagctgggctgtgtgcacgaaccccccgttcagcccgaccgctgcgccttatccggtaactatcgtcttgagtccaacccggtaagacacgacttatcgccactggcagcagccactggtaacaggattagcagagcgaggtatgtaggcggtgctacagagttcttgaagtggtggcctaactacggctacactagaaggacagtatttggtatctgcgctctgctgaagccagttaccttcggaaaaagagttggtagctcttgatccggcaaacaaaccaccgctggtagcggtggtttttttgtttgcaagcagcagattacgcgcagaaaaaaaggatctcaagaagatcctttgatcttttctacggggtctgacgctcagtggaacgaaaactcacgttaagggattttggtcatgactagtgcttggattctcaccaataaaaaacgcccggcggcaaccgagcgttctgaacaaatccagatggagttctgaggtcattactggatctatcaacaggagtccaagcgagctcgtaaacttggtctgacagttaccaatgcttaatcagtgaggcacctatctcagcgatctgtctatttcgttcatccatagttgcctgactccccgtcgtgtagataactacgatacgggagggcttaccatctggccccagtgctgcaatgataccgcgagacccacgctcaccggctccagatttatcagcaataaaccagccagccggaagggccgagcgcagaagtggtcctgcaactttatccgcctccatccagtctattaattgttgccgggaagctagagtaagtagttcgccagttaatagtttgcgcaacgttgttgccattgctacaggcatcgtggtgtcacgctcgtcgtttggtatggcttcattcagctccggttcccaacgatcaaggcgagttacatgatcccccatgttgtgcaaaaaagcggttagctccttcggtcctccgatcgttgtcagaagtaagttggccgcagtgttatcactcatggttatggcagcactgcataattctcttactgtcatgccatccgtaagatgcttttctgtgactggtgagtactcaaccaagtcattctgagaatagtgtatgcggcgaccgagttgctcttgcccggcgtcaatacgggataataccgcgccacatagcagaactttaaaagtgctcatcattggaaaacgttcttcggggcgaaaactctcaaggatcttaccgctgttgagatccagttcgatgtaacccactcgtgcacccaactgatcttcagcatcttttactttcaccagcgtttctgggtgagcaaaaacaggaaggcaaaatgccgcaaaaaagggaataagggcgacacggaaatgttgaatactcatactcttcctttttcaatattattgaagcatttatcagggttattgtctcatgagcggatacatatttgaatgtatttagaaaaataaacaaataggggttccgcgcacatttccccgaaaagtgccacctgacgtc

SEQ ID NO: 119 - DNA, 8870 bp, Artificial Sequence
  Plasmid pGV1914
tcgcgcgtttcggtgatgacggtgaaaacctctgacacatgcagctcccggagacggtcacagcttgtctgtaagcggatgccgggagcagacaagcccgtcagggcgcgtcagcgggtgttggcgggtgtcggggctggcttaactatgcggcatcagagcagattgtactgagagtgcaccatatgcggtgtgaaataccgcacagatgcgtaaggagaaaataccgcatcaggcgccattcgccattcaggctgcgcaactgttgggaagggcgatcggtgcgggcctcttcgctattacgccagctggcgaaagggggatgtgctgcaaggcgattaagttgggtaacgccagggttttcccagtcacgacgttgtaaaacgacggccagtgaattcataccacagcttttcaattcaattcatcattttttttttattcttttttttgatttcggtttccttgaaatttttttgattcggtaatctccgaacagaaggaagaacgaaggaaggagcacagacttagattggtatatatacgcatatgtagtgttgaagaaacatgaaattgcccagtattcttaacccaactgcacagaacaaaaacctgcaggaaacgaagataaatcatgtcgaaagctacatataaggaacgtgctgctactcatcctagtcctgttgctgccaagctatttaatatcatgcacgaaaagcaaacaaacttgtgtgcttcattggatgttcgtaccaccaaggaattactggagttagttgaagcattaggtcccaaaatttgtttactaaaaacacatgtggatatcttgactgatttttccatggagggcacagttaagccgctaaaggcattatccgccaagtacaattttttactcttcgaagacagaaaatttgctgacattggtaatacagtcaaattgcagtactctgcgggtgtatacagaatagcagaatgggcagacattacgaatgcacacggtgtggtgggcccaggtattgttagcggtttgaagcaggcggcagaagaagtaacaaaggaacctagaggccttttgatgttagcagaattgtcatgcaagggctccctatctactggagaatatactaagggtactgttgacattgcgaagagcgacaaagattttgttatcggctttattgctcaaagagacatgggtggaagagatgaaggttacgattggttgattatgacacccggtgtgggtttagatgacaagggagacgcattgggtcaacagtatagaaccgtggatgatgtggtctctacaggatctgacattattattgttggaagaggactatttgcaaagggaagggatgctaaggtagagggtgaacgttacagaaaagcaggctgggaagcatatttgagaagatgcggccagcaaaactaaaaaactgtattataagtaaatgcatgtatactaaactcacaaattagagcttcaatttaattatatcagttattaccctatgcggtgtgaaataccgcacagatgcgtaaggagaaaataccgcatcaggaaattgtaaacgttaatattttgttaaaattcgcgttaaatttttgttaaatcagctcattttttaaccaataggccgaaatcggcaaaatcccttataaatcaaaagaatagaccgagatagggttgagtgttgttccagtttggaacaagagtccactattaaagaacgtggactccaacgtcaaagggcgaaaaaccgtctatcagggcgatggcccactacgtgaaccatcaccctaatcaagttttttggggtcgaggtgccgtaaagcactaaatcggaaccctaaagggagcccccgatttagagcttgacggggaaagccggcgaggactgcaatagcacaagattaagatagaatggcttcaaacagccgccttttatacatattggtaaaagctcgcgaatcgcaccatatcccttatcctgtaatcaaatcgatctaggtgcagatacagatcaattcataaaaagaaattgaagcaccagtttatcactactacactatctttttcttttttttttttttttgcgcagtttcgccctttgttcaatatcacttgataagttgtgggctttttctgtcactcattcggcttaaaaagtattcgttcttttgtgttttatgaaaagggaacgtgatataaaaaaacatcctttggtgtgggacatgggcttttgtttagagaatggttatcactaccgcccccacccttgaaagccacagaaaatgaaaaagtatgtgaataaggtgtgaactctataacattttggccaaatgccacagccgatctgcatattccaatggacatgatgcaacaacaattgatgtcacattctcttacacacttcgattggtccgtacgtagtactttttacataactgactcaggcgtttccttcattgaaatgctcatctattgccaagtacatagaatccacagtgcataggttaacgcattgtacccaaacgacgggaaacaaggaaggatgcagaatgagcacttgttatttataaaaagacacgggagggggaatcccgtctttcgtccgtcggagccaaagagatgagccaaagcagaaaaacaggggacgccgcccttcttccgtcccgtgcgtgaggggggcgcggccattcggtttttgcaatatgacctgtgggccaaaaatcgaaaaaaaaaaaaaaaataagaggcggctgcggaattttataagacaagcgcagggccaaagaaaaaataataattgacgtggctgaacaacagtctctccccacccctttccaaaaaggggaatgaaatacgagttctttttcccaattggtagatattcaacaagagacgcgcagtacgtaacatgcgaattgcgtaattcacggcgataacgtagtatttagatttagtataatttgaaccgatgtatttatttgtctgattgatttatgtattcaaactgtgtaagtttatttatttgcaacaataattcgtttgagtacactactaatggcggccgcttagatgccggagtcccagtgcttggtccactggatggcctccagggtgcccaagtccagtttccagatggctccgttctggttcagctcgatagccttgacgaagttctcggcgcaggccaacgagggctgggtgggatgagccaggagcttctcggcaacctgaggctcaacatccaaccaggagttgaacgtgtgcaccagggtggtgcgggtgatgccggggttcacagtgtaagccgtcacgccggtaatgggggccagtttcgccagggagctggtgaagttgaccacggcggccttggtgccggagtagacgggcacctggtagatggcattgaatccagtgacggatccaatgttgcagatgataccaccgggaccgcccttgcgcttgtcccagaagtccagaatggccgtcgtggtgttgaccaggccagtgtagttgacggcaatggtgcgctcgatctggtgatcgtccaggataccagctccgttgatcaggacatcgacggtcttcagctgggcgaagatggtcttcagcagcttggtggtctcggcaatgggcacggtcacatcataggggtagaaggtgacggtcacctttggattgattgccttcagctcggcaatggcagccgggttctcaatgcggtcgaggatcaccaggttcttcagatcgcgcttgagcagctccttgctggtgtccagaccaatgcctcccagaccggcaacgaaaatcacgttcttgttggtcaaagtaaacgacataccggtatctcctagatccgtcgaagtcgaaactaagttctggtgttttaaaactaaaaaaaagactaactataaaagtagaatttaagaagtttaagaaatagatttacagaattacaatcaatacctaccgtctttatatacttattagtcaagtaggggaataatttcagggaactggtttcaaccttttttttcagctttttccaaatcagagagagcagaaggtaatagaaggtgtaagaaaatgagatagatacatgcgtgggtcaattgccttgtgtcatcatttactccaggcaggttgcatcactccattgaggttgtgcccgttttttgcctgtttgtgcccctgttctctgtagttgcgctaagagaatggacctatgaactgatggttggtgaagaaaacaatattttggtgctgggattctttttttttctggatgccagcttaaaaagcgggctccattatatttagtggatgccaggaataaactgttcacccagacacctacgatgttatatattctgtgtaacccgccccctattttgggcatgtacgggttacagcagaattaaaaggctaattttttgactaaataaagttaggaaaatcactactattaattatttacgtattctttgaaatggcgagtattgataatgataaactggatccttaggatttattctgttcagcaaacagcttgcccattttcttcagtaccttcggtgcgccttctttcgccaggatcagttcgatccagtacatacggttcggatcggcctgggcctctttcatcacgctcacaaattcgttttcggtacgcacaattttagacacaacacggtcctcagttgcgccgaaggactccggcagtttagagtagttccacatagggatatcgttgtaagactggttcggaccgtggatctcacgctcaacggtgtagccgtcattgttaataatgaagcaaatcgggttgatcttttcacgaattgccagacccagttcctgtacggtcagctgcagggaaccgtcaccgatgaacagcagatgacgagattctttatcagcgatctgagagcccagcgctgccgggaaagtatagccaatgctaccccacagcggctgaccgataaaatggcttttggatttcagaaagatagaagacgcgccgaaaaagctcgtaccttgttccgccacgatggtttcattgctctgggtcaggttctccacggcctgccacaggcgatcctgggacagcagtgcgttagatggtacgaaatcttcttgctttttgtcaatgtatttgcctttatactcgatttcggacaggtccagcagagagctgatcaggctttcgaagtcgaagttctggatacgctcgttgaagattttaccctcgtcgatgttcaggctaatcattttgttttcgttcagatggtgagtgaatgcaccggtagaagagtcggtcagtttaacgcccagcatcaggatgaagtccgcagattcaacaaattctttcaggttcggttcgctcagagtaccgttgtagatgcccaggaaagacggcagagcctcgtcaacagaggacttgccgaagttcagggtggtaatcggcagtttggttttgctgatgaattgggtcacggtcttctccagaccaaaagaaatgatttcgtggccggtgatcacgattggtttctttgcgtttttcagagactcctggattttgttcaggatttcctggtcgctagtgttagaagtggagttttctttcttcagcggcaggctcggtttttccgctttagctgccgcaacatccacaggcaggttgatgtaaactggtttgcgttctttcagcagcgcagacagaacgcggtcgatttccacagtagcgttctctgcagtcagcagcgtacgtgccgcagtcacaggttcatgcattttcatgaagtgtttgaaatcgccgtcagccagagtgtggtggacgaatttaccttcgttctgaactttgctcgttgggctgcctacgatctccaccaccggcaggttttcggcgtaggagcccgccagaccgttgacggcgctcagttcgccaacaccgaaagtggtcagaaatgccgcggctttcttggtacgtgcataaccatctgccatgtagcttgcgttcagttcgttagcgttacccacccatttcatgtctttatgagagatgatctgatccaggaactgcagattgtaatcacccggaacgccgaagatttcttcgatacccagttcatgcagacggtccagcagataatcaccaacagtatacatgtcgacaaacttagattagattgctatgctttctttctaatgagcaagaagtaaaaaaagttgtaatagaacaagaaaaatgaaactgaaacttgagaaattgaagaccgtttattaacttaaatatcaatgggaggtcatcgaaagagaaaaaaatcaaaaaaaaaattttcaagaaaaagaaacgtgataaaaatttttattgcctttttcgacgaagaaaaagaaacgaggcggtctcttttttcttttccaaacctttagtacgggtaattaacgacaccctagaggaagaaagaggggaaatttagtatgctgtgcttgggtgttttgaagtggtacggcgatgcgcggagtccgagaaaatctggaagagtaaaaaaggagtagaaacattttgaagctatgagctccagcttttgttccctttagtgagggttaattgcgcgcttggcgtaatcatggtcatagctgtttcctgtgtgaaattgttatccgctcacaattccacacaacataggagccggaagcataaagtgtaaagcctggggtgcctaatgagtgaggtaactcacattaattgcgttgcgctcactgcccgctttccagtcgggaaacctgtcgtgccagctgcattaatgaatcggccaacgcgcggggagaggcggtttgcgtattgggcgctcttccgcttcctcgctcactgactcgctgcgctcggtcgttcggctgcggcgagcggtatcagctcactcaaaggcggtaatacggttatccacagaatcaggggataacgcaggaaagaacatgtgagcaaaaggccagcaaaaggccaggaaccgtaaaaaggccgcgttgctggcgtttttccataggctccgcccccctgacgagcatcacaaaaatcgacgctcaagtcagaggtggcgaaacccgacaggactataaagataccaggcgtttccccctggaagctccctcgtgcgctctcctgttccgaccctgccgcttaccggatacctgtccgcctttctcccttcgggaagcgtggcgctttctcatagctcacgctgtaggtatctcagttcggtgtaggtcgttcgctccaagctgggctgtgtgcacgaaccccccgttcagcccgaccgctgcgccttatccggtaactatcgtcttgagtccaacccggtaagacacgacttatcgccactggcagcagccactggtaacaggattagcagagcgaggtatgtaggcggtgctacagagttcttgaagtggtggcctaactacggctacactagaaggacagtatttggtatctgcgctctgctgaagccagttaccttcggaaaaagagttggtagctcttgatccggcaaacaaaccaccgctggtagcggtggtttttttgtttgcaagcagcagattacgcgcagaaaaaaaggatctcaagaagatcctttgatcttttctacggggtctgacgctcagtggaacgaaaactcacgttaagggattttggtcatgagattatcaaaaaggatcttcacctagatccttttaaattaaaaatgaagttttaaatcaatctaaagtatatatgagtaaacttggtctgacagttaccaatgcttaatcagtgaggcacctatctcagcgatctgtctatttcgttcatccatagttgcctgactccccgtcgtgtagataactacgatacgggagggcttaccatctggccccagtgctgcaatgataccgcgagacccacgctcaccggctccagatttatcagcaataaaccagccagccggaagggccgagcgcagaagtggtcctgcaactttatccgcctccatccagtctattaattgttgccgggaagctagagtaagtagttcgccagttaatagtttgcgcaacgttgttgccattgctacaggcatcgtggtgtcacgctcgtcgtttggtatggcttcattcagctccggttcccaacgatcaaggcgagttacatgatcccccatgttgtgcaaaaaagcggttagctccttcggtcctccgatcgttgtcagaagtaagttggccgcagtgttatcactcatggttatggcagcactgcataattctcttactgtcatgccatccgtaagatgcttttctgtgactggtgagtactcaaccaagtcattctgagaatagtgtatgcggcgaccgagttgctcttgcccggcgtcaatacgggataataccgcgccacatagcagaactttaaaagtgctcatcattggaaaacgttcttcggggcgaaaactctcaaggatcttaccgctgttgagatccagttcgatgtaacccactcgtgcacccaactgatcttcagcatcttttactttcaccagcgtttctgggtgagcaaaaacaggaaggcaaaatgccgcaaaaaagggaataagggcgacacggaaatgttgaatactcatactcttcctttttcaatattattgaagcatttatcagggttattgtctcatgagcggatacatatttgaatgtatttagaaaaataaacaaataggggttccgcgcacatttccccgaaaagtgccacctgacgtctaagaaaccattattatcatgacattaacctataaaaataggcgtatcacgaggccctttcgtc

SEQ ID NO: 120 - DNA, 9516 bp, Artificial Sequence
  Plasmid pGV1936
ccagttaactgtgggaatactcaggtatcgtaagatgcaagagttcgaatctcttagcaaccattatttttttcctcaacataacgagaacacacaggggcgctatcgcacagaatcaaattcgatgactggaaattttttgttaatttcagaggtcgcctgacgcatatacctttttcaactgaaaaattgggagaaaaaggaaaggtgagagcgccggaaccggcttttcatatagaatagagaagcgttcatgactaaatgcttgcatcacaatacttgaagttgacaatattatttaaggacctattgttttttccaataggtggttagcaatcgtcttactttctaacttttcttaccttttacatttcagcaatatatatatatatatttcaaggatataccattctaatgtctgcccctaagaagatcgtcgttttgccaggtgaccacgttggtcaagaaatcacagccgaagccattaaggttcttaaagctatttctgatgttcgttccaatgtcaagttcgatttcgaaaatcatttaattggtggtgctgctatcgatgctacaggtgttccacttccagatgaggcgctggaagcctccaagaaggctgatgccgttttgttaggtgctgtgggtggtcctaaatggggtaccggtagtgttagacctgaacaaggtttactaaaaatccgtaaagaacttcaattgtacgccaacttaagaccatgtaactttgcatccgactctcttttagacttatctccaatcaagccacaatttgctaaaggtactgacttcgttgttgtcagagaattagtgggaggtatttactttggtaagagaaaggaagacgatggtgatggtgtcgcttgggatagtgaacaatacaccgttccagaagtgcaaagaatcacaagaatggccgctttcatggccctacaacatgagccaccattgcctatttggtccttggataaagctaatgttttggcctcttcaagattatggagaaaaactgtggaggaaaccatcaagaacgaattccctacattgaaggttcaacatcaattgattgattctgccgccatgatcctagttaagaacccaacccacctaaatggtattataatcaccagcaacatgtttggtgatatcatctccgatgaagcctccgttatcccaggttccttgggtttgttgccatctgcgtccttggcctctttgccagacaagaacaccgcatttggtttgtacgaaccatgccacggttctgctccagatttgccaaagaataaggtcaaccctatcgccactatcttgtctgctgcaatgatgttgaaattgtcattgaacttgcctgaagaaggtaaggccattgaagatgcagttaaaaaggttttggatgcaggtatcagaactggtgatttaggtggttccaacagtaccaccgaagtcggtgatgctgtcgccgaagaagttaagaaaatccttgcttaaaaagattctctttttttatgatatttgtacataaactttataaatgaaattcataatagaaacgacacgaaattacaaaatggaatatgttcatagggtagacgaaactatatacgcaatctacatacatttatcaagaaggagaaaaaggaggatgtaaaggaatacaggtaagcaaattgatactaatggctcaacgtgataaggaaaaagaattgcactttaacattaatattgacaaggaggagggcaccacacaaaaagttaggtgtaacagaaaatcatgaaactatgattcctaatttatatattggaggattttctctaaaaaaaaaaaaatacaacaaataaaaaacactcaatgacctgaccatttgatggagttgccggcttgatcgagaatggcagctcttatatacaagttcttttagcaagcgccgctgcattattcaagtctcatcatatgaaatttctttcgagagattgtcataatcaaaaaattgcataatgcatttcttgcaacacattttctgatataatcttaccttaatgcaggtttacgtattagtttttctaaaagaaacgcgacctttggatatggaggcttttcccataaacgcatgtagtatgcatttacgatgagaatcaatttttttccaaggggcgcaaaacgcataaacgcataaagtatgcatcagaaggattctcacctggttgcaaccatacaggtgttagcgacagtaatagaaaaaaaattaaaataatggtgttattgttatttgctttatttccttggcctttgttgaaggaattcgtatacgtattacaaataactagtatcgaggaacttgaaagagctgaaatttttgcattcttcttcggtgattatgcctaagccaatgaggtcgccccaaaagaccgcaatcttgtcacgaccataagccatataatcgcgaacaaaaacccgtttttaggaaggacagaggtccatatcaatataattaagaaggcatgttggcctctgtttcttaatatattctaaataagatgtaaggccttgtaattcagtttgttcacaaaattaaaaactgtttaatgttttttgttttgttgtagtattcgagcattaaggataaaaaaagcttgtgaataaaaatctttcgctaaaaatcaatataagaaaatggtaagcagctgaaagataataaggtatggttaaagatcacaccaccctcttcaattagctaagatcatagctaaaggtacaaaaccgaatacgaaagtaaataaattaatcagcataaaattaaataataaaccacctaaaatattagaagctaatctttaacctggaagacaggacagaaaagtaattacaagaacatatgtgaaaaaaaatagttgatattttaaaccaaatcagaaatttattatactaaaactatatctatgccaattatttacctaaacatctataaccttcaaaagtaaaaaaatacacaaacgttgaatcatgagttttatgttaattaggcggccgcggatcttcatcctgccactgcaattcttttcatatcggtcatatatcctctcagctttttacccacctgttctatagcatgtgaacgaatagcttcatttacgtctctcagttggccattgtcaaccgctccttccggaatagccttccccaaatcaccaggttgtaactcggccatgaagggctttaacaacgggacacatgcgtagctaaataagtaattaccatattctgcagtgtctgatatgacaacattcatctcgtaaagtctttttcttgcaatagtatttgctatcaaaggcaattcatgcaaagactcatagtatgcagattcttcaatgataccggagtcaaccatagtttcgaatgcaagttctacccctgccttcaccatagctatcatcaatactcccttatcaaagtattcttgttcaccaattttaccttcgtattgtggggctgtctcgaatgccgtcttgccggtttcttctctccacgtcaataactttttatcatcgtttgcccaatctgccatcattcctgaggaaaactcaccggagataatatcgtccatgtgcttttggaataatggtgccatgatctcttttagttgctcagataaggcgtaggctcttagcttggccggatttgaaagtctatccatcatcaatgttatgccaccttgtttaagtgcctcggtgattgtctcccaaccaaattgtatcaacttttcagcataggcaggatctgtaccctcttcgaccaatttatcaaagcatagtaaagaccctgcctgcaacattccgcacagaatggtttgttcacccattaagtcactcttgacctcagctacgaaagaactctctaacacacccgctctatgacctccggttgcggctgcccatgccttcgcaattgccataccttcacctttggggtcattttcaggatgtacggcgatcaatgtaggtacaccaaaacccctcttgtactcctctctgacttccgtacctgggcactttggtgcaaccattacgactgttatatcttttctgatctgctcgcccacttcaacgatattaaagccatgagagtaacctaaagctgccccatccttcatcagcggttgaactgttcttactacgtctgagtgaaccttatctggtgttaggttaatcactaaatctgcctgagggatcagttcttcgtaagtaccaactttgaacccattttccgtcgctttacgccaggaggccctcttttctgcaattgcctctttcctcaatgcatacgaaatatccagacctgaatctctcatgtttaaaccttggtttagaccctgagcaccgcagccaacaattactactttctttccttgcagataagaagcaccatcagcaaactcgtcccttcccataaatctgcacttacccagttgagccaattgttgtctcaaatttaatgtgttaaaatagttggccatctcgagtcgaaactaagttctggtgttttaaaactaaaaaaaagactaactataaaagtagaatttaagaagtttaagaaatagatttacagaattacaatcaatacctaccgtctttatatacttattagtcaagtaggggaataatttcagggaactggtttcaaccttttttttcagctttttccaaatcagagagagcagaaggtaatagaaggtgtaagaaaatgagatagatacatgcgtgggtcaattgccttgtgtcatcatttactccaggcaggttgcatcactccattgaggttgtgcccgttttttgcctgtttgtgcccctgttctctgtagttgcgctaagagaatggacctatgaactgatggttggtgaagaaaacaatattttggtgctgggattctttttttttctggatgccagcttaaaaagcgggctccattatatttagtggatgccaggaataaactgttcacccagacacctacgatgttatatattctgtgtaacccgccccctattttgggcatgtacgggttacagcagaattaaaaggctaattttttgactaaataaagttaggaaaatcactactattaattatttacgtattctttgaaatggcgagtattgataatgataaactggatcctcaagcatctaaaacacaaccgttggaagcgttggaaaccaacttagcatacttggatagagtacctcttgtgtaacgaggtggaggtgcaacccaactttgtttacgttgagccatttccttatcagagactaataggtcaatcttgttattatcagcatcaatgataatctcatcgccgtctctgaccaacccgataggaccaccttcagcggcttcgggaacaatgtggccgattaagaacccgtgagaaccaccagagaatctaccatcagtcaacaatgcaacatctttacccaaaccgtaacccatcagagcagaggaaggctttagcatttcaggcatacctggtgcacctcttggaccttcatatctgataacaacaacggttttttcacccttcttgatttcacctctttccaaggcttcaataaaggcaccttcctcttcgaacacacgtgctctacccttgaagtaagtaccttccttaccggtaattttacccacagctccacctggtgccaatgaaccgtacagaatttgcaagtgaccgttggccttgattgggtgggagagtggcttaataatctcttgtccttcaggtaggcttggtgctttctttgcacgttctgccaaagtgtcaccggtaacagtcattgtgttaccgtgcaacatgttgttttcatatagatacttaatcacagattgggtaccaccaacgttaatcaaatcggccatgacgtatttaccagaaggtttgaagtcaccgatcaatggtgtagtatcactgattctttggaaatcatctggtgacaacttgacacccgcagagtgagcaacagccaccaaatgcaaaacagcattagtggacccaccggttgcaacgacataagtaatggcgttttcaaaagcctcttttgtgaggatatcacgaggtaaaatacccaattccattgtcttcttgatgtattcaccaatgttgtcacactcagctaacttctccttggaaacggctgggaaggaagaggagtttggaatggtcaaacctagcacttcagcggcagaagccattgtgttggcagtatacataccaccacaagaaccaggacctgggcatgcatgttccacaacatcttctctttcttcttcagtgaattgcttggaaatatattcaccgtaggattggaacgcagagacgatatcgatgtttttagagatcttcgaagaaccacatgttggatgaccgggcaagatagtaccaccatataccatgatggaaggtctgttatgtctacccatggccatcatgacaccgggcatgtttttgtcacatgatgggatggcgatgttagcatcgtagtgttgtgccatcatgatggtttcaaaggagtctgcaatgatttctctactttgtaacgagtatctcatacctttagtacccatagagataccgtctgaaacaccgatggtgttgaactgcatagctttcaaacccgctttttcaatggattgagaacatctgttattcaagtccaatagatgcatgttacatgggttaccggaccaccaacaggaaccaaccccgacttgaggcttcttgaaatcttccttcttgaaaccggtggcataaagcatggcctgggacgcaccttggcccttaggttcagtgatgatatacgagtacttgttgagcttcttcatgtcgacaaacttagattagattgctatgctttctttctaatgagcaagaagtaaaaaaagttgtaatagaacaagaaaaatgaaactgaaacttgagaaattgaagaccgtttattaacttaaatatcaatgggaggtcatcgaaagagaaaaaaatcaaaaaaaaaattttcaagaaaaagaaacgtgataaaaatttttattgcctttttcgacgaagaaaaagaaacgaggcggtctcttttttcttttccaaacctttagtacgggtaattaacgacaccctagaggaagaaagaggggaaatttagtatgctgtgcttgggtgttttgaagtggtacggcgatgcgcggagtccgagaaaatctggaagagtaaaaaaggagtagaaacattttgaagctatgagctccagcttttgttccctttagtgagggttaattgcgcgcttggcgtaatcatggtcatagctgtttcctgtgtgaaattgttatccgctcacaattccacacaacataggagccggaagcataaagtgtaaagcctggggtgcctaatgagtgaggtaactcacattaattgcgttgcgctcactgcccgctttccagtcgggaaacctgtcgtgccagctgcattaatgaatcggccaacgcgcggggagaggcggtttgcgtattgggcgctcttccgcttcctcgctcactgactcgctgcgctcggtcgttcggctgcggcgagcggtatcagctcactcaaaggcggtaatacggttatccacagaatcaggggataacgcaggaaagaacatgtgagcaaaaggccagcaaaaggccaggaaccgtaaaaaggccgcgttgctggcgtttttccataggctccgcccccctgacgagcatcacaaaaatcgacgctcaagtcagaggtggcgaaacccgacaggactataaagataccaggcgtttccccctggaagctccctcgtgcgctctcctgttccgaccctgccgcttaccggatacctgtccgcctttctcccttcgggaagcgtggcgctttctcatagctcacgctgtaggtatctcagttcggtgtaggtcgttcgctccaagctgggctgtgtgcacgaaccccccgttcagcccgaccgctgcgccttatccggtaactatcgtcttgagtccaacccggtaagacacgacttatcgccactggcagcagccactggtaacaggattagcagagcgaggtatgtaggcggtgctacagagttcttgaagtggtggcctaactacggctacactagaaggacagtatttggtatctgcgctctgctgaagccagttaccttcggaaaaagagttggtagctcttgatccggcaaacaaaccaccgctggtagcggtggtttttttgtttgcaagcagcagattacgcgcagaaaaaaaggatctcaagaagatcctttgatcttttctacggggtctgacgctcagtggaacgaaaactcacgttaagggattttggtcatgagattatcaaaaaggatcttcacctagatccttttaaattaaaaatgaagttttaaatcaatctaaagtatatatgagtaaacttggtctgacagttaccaatgcttaatcagtgaggcacctatctcagcgatctgtctatttcgttcatccatagttgcctgactccccgtcgtgtagataactacgatacgggagggcttaccatctggccccagtgctgcaatgataccgcgagacccacgctcaccggctccagatttatcagcaataaaccagccagccggaagggccgagcgcagaagtggtcctgcaactttatccgcctccatccagtctattaattgttgccgggaagctagagtaagtagttcgccagttaatagtttgcgcaacgttgttgccattgctacaggcatcgtggtgtcacgctcgtcgtttggtatggcttcattcagctccggttcccaacgatcaaggcgagttacatgatcccccatgttgtgcaaaaaagcggttagctccttcggtcctccgatcgttgtcagaagtaagttggccgcagtgttatcactcatggttatggcagcactgcataattctcttactgtcatgccatccgtaagatgcttttctgtgactggtgagtactcaaccaagtcattctgagaatagtgtatgcggcgaccgagttgctcttgcccggcgtcaatacgggataataccgcgccacatagcagaactttaaaagtgctcatcattggaaaacgttcttcggggcgaaaactctcaaggatcttaccgctgttgagatccagttcgatgtaacccactcgtgcacccaactgatcttcagcatcttttactttcaccagcgtttctgggtgagcaaaaacaggaaggcaaaatgccgcaaaaaagggaataagggcgacacggaaatgttgaatactcatactcttcctttttcaatattattgaagcatttatcagggttattgtctcatgagcggatacatatttgaatgtatttagaaaaataaacaaataggggttccgcgcacatttccccgaaaagtgccacctgacgt

SEQ ID NO: 121 - DNA, 6679 bp, Artificial Sequence
  Plasmid pGV2020
ttggatcatactaagaaaccattattatcatgacattaacctataaaaataggcgtatcacgaggccctttcgtctcgcgcgtttcggtgatgacggtgaaaacctctgacacatgcagctcccggagacggtcacagcttgtctgtaagcggatgccgggagcagacaagcccgtcagggcgcgtcagcgggtgttggcgggtgtcggggctggcttaactatgcggcatcagagcagattgtactgagagtgcaccataccacagcttttcaattcaattcatcattttttttttattcttttttttgatttcggtttctttgaaatttttttgattcggtaatctccgaacagaaggaagaacgaaggaaggagcacagacttagattggtatatatacgcatatggcaaattaaagccttcgagcgtcccaaaaccttctcaagcaaggttttcagtataatgttacatgcgtacacgcgtctgtacagaaaaaaaagaaaaatttgaaatataaataacgttcttaatactaacataactataaaaaaataaatagggacctagacttcaggttgtctaactccttccttttcggttagagcggatgtggggggagggcgtgaatgtaagcgtgacataagaattcttagaaaaactcatcgagcatcaaatgaaactgcaatttattcatatcaggattatcaataccatatttttgaaaaagccgtttctgtaatgaaggagaaaactcaccgaggcagttccataggatggcaagatcctggtatcggtctgcgatcccgactcgtccaacatcaatacaacctattaatttcccctcgtcaaaaataaggttatcaagtgagaaatcaccatgagtgacgactgaatccggtgagaatggcaaaagcttatgcatttctttccagacttgttcaacaggccagccattacgctcgtcatcaaaatcactcgcgtcaaccaaaccgttattcattcgtgattgcgcctgagcgaggcgaaatacgcgatcgctgttaaaaggacaattacaaacaggaatcgaatgcaaccggcgcaggaacactgccagcgcatcaacaatattttcacctgaatcaggatattcttctaatacctggaatgctgttttgccggggatcgcagtggtgagtaaccatgcatcatcaggagtacggacaaaatgcttgatggtcggaagaggcataaattccgtcagccagtttagtctgaccatctcatctgcaacatcattggcaacgctacctttgccatgtttcagaaacaactctggcgcatcgggcttcccatacaatcgatagattgtcgcacctgattgcccgacattatcgcgagcccatttatacccatataaatcagcatccatgttggaatttaatcgcggcctcgaaacgtgagtcttttccttacccatactagtttttagtttatgtatgtgttttttgtagttatagatttaagcaagaaaagaatacaaacaaaaaattgaaaaagattgatttagaattaaaaagaaaaatatttacgtaagaagggaaaatagtaaatgttgcaagttcactaaactcctaaattatgctgccctttatattccctgttacagcagccgagccaaaggtatataggctcctttgcattagcatgcgtaacaaaccacctgtcagtttcaaccgaggtggtatccgagagaattgtgtgattgctttaattaatttcggagaatctcacatgccactgaagattaaaaactggatgccagaaaaggggtgtccaggtgtaacatcaatagaggaagctgaaaagtcttagaacgggtaatcttccaccaacctgatgggttcctagatataatctcgaagggaataagtagggtgataccgcagaagtgtctgaatgtattaaggtcctcacagtttaaatcccgctcacactaacgtaggattattataactcaaaaaaatggcattattctaagtaagttaaatatccgtaatctttaaacagcggccgcagatctctcgagtcgaaactaagttctggtgttttaaaactaaaaaaaagactaactataaaagtagaatttaagaagtttaagaaatagatttacagaattacaatcaatacctaccgtctttatatacttattagtcaagtaggggaataatttcagggaactggtttcaaccttttttttcagctttttccaaatcagagagagcagaaggtaatagaaggtgtaagaaaatgagatagatacatgcgtgggtcaattgccttgtgtcatcatttactccaggcaggttgcatcactccattgaggttgtgcccgttttttgcctgtttgtgcccctgttctctgtagttgcgctaagagaatggacctatgaactgatggttggtgaagaaaacaatattttggtgctgggattctttttttttctggatgccagcttaaaaagcgggctccattatatttagtggatgccaggaataaactgttcacccagacacctacgatgttatatattctgtgtaacccgccccctattttgggcatgtacgggttacagcagaattaaaaggctaattttttgactaaataaagttaggaaaatcactactattaattatttacgtattctttgaaatggcgagtattgataatgataaactggatccgtcgacaaacttagattagattgctatgctttctttctaatgagcaagaagtaaaaaaagttgtaatagaacaagaaaaatgaaactgaaacttgagaaattgaagaccgtttattaacttaaatatcaatgggaggtcatcgaaagagaaaaaaatcaaaaaaaaaattttcaagaaaaagaaacgtgataaaaatttttattgcctttttcgacgaagaaaaagaaacgaggcggtctcttttttcttttccaaacctttagtacgggtaattaacgacaccctagaggaagaaagaggggaaatttagtatgctgtgcttgggtgttttgaagtggtacggcgatgcgcggagtccgagaaaatctggaagagtaaaaaaggagtagaaacattttgaagctatgagctccagcttttgttccctttagtgagggttaattgcgcgcttggcgtaatcatggtcatagctgtttcctgtgtgaaattgttatccgctcacaattccacacaacataggagccggaagcataaagtgtaaagcctggggtgcctaatgagtgaggtaactcacattaattgcgttgcgctcactgcccgctttccagtcgggaaacctgtcgtgccagctgcattaatgaatcggccaacgcgcggggagaggcggtttgcgtattgggcgctcttccgcttcctcgctcactgactcgctgcgctcggtcgttcggctgcggcgagcggtatcagctcactcaaaggcggtaatacggttatccacagaatcaggggataacgcaggaaagaacatgtgagcaaaaggccagcaaaaggccaggaaccgtaaaaaggccgcgttgctggcgtttttccataggctccgcccccctgacgagcatcacaaaaatcgacgctcaagtcagaggtggcgaaacccgacaggactataaagataccaggcgtttccccctggaagctccctcgtgcgctctcctgttccgaccctgccgcttaccggatacctgtccgcctttctcccttcgggaagcgtggcgctttctcatagctcacgctgtaggtatctcagttcggtgtaggtcgttcgctccaagctgggctgtgtgcacgaaccccccgttcagcccgaccgctgcgccttatccggtaactatcgtcttgagtccaacccggtaagacacgacttatcgccactggcagcagccactggtaacaggattagcagagcgaggtatgtaggcggtgctacagagttcttgaagtggtggcctaactacggctacactagaaggacagtatttggtatctgcgctctgctgaagccagttaccttcggaaaaagagttggtagctcttgatccggcaaacaaaccaccgctggtagcggtggtttttttgtttgcaagcagcagattacgcgcagaaaaaaaggatctcaagaagatcctttgatcttttctacggggtctgacgctcagtggaacgaaaactcacgttaagggattttggtcatgagattatcaaaaaggatcttcacctagatccttttaaattaaaaatgaagttttaaatcaatctaaagtatatatgagtaaacttggtctgacagttaccaatgcttaatcagtgaggcacctatctcagcgatctgtctatttcgttcatccatagttgcctgactccccgtcgtgtagataactacgatacgggagggcttaccatctggccccagtgctgcaatgataccgcgagacccacgctcaccggctccagatttatcagcaataaaccagccagccggaagggccgagcgcagaagtggtcctgcaactttatccgcctccatccagtctattaattgttgccgggaagctagagtaagtagttcgccagttaatagtttgcgcaacgttgttgccattgctacaggcatcgtggtgtcacgctcgtcgtttggtatggcttcattcagctccggttcccaacgatcaaggcgagttacatgatcccccatgttgtgcaaaaaagcggttagctccttcggtcctccgatcgttgtcagaagtaagttggccgcagtgttatcactcatggttatggcagcactgcataattctcttactgtcatgccatccgtaagatgcttttctgtgactggtgagtactcaaccaagtcattctgagaatagtgtatgcggcgaccgagttgctcttgcccggcgtcaatacgggataataccgcgccacatagcagaactttaaaagtgctcatcattggaaaacgttcttcggggcgaaaactctcaaggatcttaccgctgttgagatccagttcgatgtaacccactcgtgcacccaactgatcttcagcatcttttactttcaccagcgtttctgggtgagcaaaaacaggaaggcaaaatgccgcaaaaaagggaataagggcgacacggaaatgttgaatactcatactcttcctttttcaatattattgaagcatttatcagggttattgtctcatgagcggatacatatttgaatgtatttagaaaaataaacaaataggggttccgcgcacatttccccgaaaagtgccacctgaacgaagcatctgtgcttcattttgtagaacaaaaatgcaacgcgagagcgctaatttttcaaacaaagaatctgagctgcatttttacagaacagaaatgcaacgcgaaagcgctattttaccaacgaagaatctgtgcttcatttttgtaaaacaaaaatgcaacgcgagagcgctaatttttcaaacaaagaatctgagctgcatttttacagaacagaaatgcaacgcgagagcgctattttaccaacaaagaatctatacttcttttttgttctacaaaaatgcatcccgagagcgctatttttctaacaaagcatcttagattactttttttctcctttgtgcgctctataatgcagtctcttgataactttttgcactgtaggtccgttaaggttagaagaaggctactttggtgtctattttctcttccataaaaaaagcctgactccacttcccgcgtttactgattactagcgaagctgcgggtgcattttttcaagataaaggcatccccgattatattctataccgatgtggattgcgcatactttgtgaacagaaagtgatagcgttgatgattcttcattggtcagaaaattatgaacggtttcttctattttgtctctatatactacgtataggaaatgtttacattttcgtattgttttcgattcactctatgaatagttcttactacaatttttttgtctaaagagtaatactagagataaacataaaaaatgtagaggtcgagtttagatgcaagttcaaggagcgaaaggtggatgggtaggttatatagggatatagcacagagatatatagcaaagagatacttttgagcaatgtttgtggaagcggtattcgcaatattttagtagctcgttacagtccggtgcgtttttggttttttgaaagtgcgtcttcagagcgcttttggttttcaaaagcgctctgaagttcctatactttctagagaataggaacttcggaataggaacttcaaagcgtttccgaaaacgagcgcttccgaaaatgcaacgcgagctgcgcacatacagctcactgttcacgtcgcacctatatctgcgtgttgcctgtatatatatatacatgagaagaacggcatagtgcgtgtttatgcttaaatgcgtacttatatgcgtctatttatgtaggatgaaaggtagtctagtacctcctgtgatattatcccattccatgcggggtatcgtatgcttccttcagcactaccctttagctgttctatatgctgccactcctcaattggattagtctcatccttcaatgctatcatttcctttgata

SEQ ID NO: 122 - DNA, 13805 bp, Artificial Sequence
  Plasmid pGV2082
ttggatcatactaagaaaccattattatcatgacattaacctataaaaataggcgtatcacgaggccctttcgtctcgcgcgtttcggtgatgacggtgaaaacctctgacacatgcagctcccggagacggtcacagcttgtctgtaagcggatgccgggagcagacaagcccgtcagggcgcgtcagcgggtgttggcgggtgtcggggctggcttaactatgcggcatcagagcagattgtactgagagtgcaccataccacagcttttcaattcaattcatcattttttttttattcttttttttgatttcggtttctttgaaatttttttgattcggtaatctccgaacagaaggaagaacgaaggaaggagcacagacttagattggtatatatacgcatatggcaaattaaagccttcgagcgtcccaaaaccttctcaagcaaggttttcagtataatgttacatgcgtacacgcgtctgtacagaaaaaaaagaaaaatttgaaatataaataacgttcttaatactaacataactataaaaaaataaatagggacctagacttcaggttgtctaactccttccttttcggttagagcggatgtggggggagggcgtgaatgtaagcgtgacataactaattacatgactcgagcggccgcttagatgccggagtcccagtgcttggtccactggatggcctccagggtgcccaagtccagtttccagatggctccgttctggttcagctcgatagccttgacgaagttctcggcgcaggccaacgagggctgggtgggatgagccaggagcttctcggcaacctgaggctcaacatccaaccaggagttgaacgtgtgcaccagggtggtgcgggtgatgccggggttcacagtgtaagccgtcacgccggtaatgggggccagtttcgccagggagctggtgaagttgaccacggcggccttggtgccggagtagacgggcacctggtagatggcattgaatccagtgacggatccaatgttgcagatgataccaccgggaccgcccttgcgcttgtcccagaagtccagaatggccgtcgtggtgttgaccaggccagtgtagttgacggcaatggtgcgctcgatctggtgatcgtccaggataccagctccgttgatcaggacatcgacggtcttcagctgggcgaagatggtcttcagcagcttggtggtctcggcaatgggcacggtcacatcataggggtagaaggtgacggtcacctttggattgattgccttcagctcggcaatggcagccgggttctcaatgcggtcgaggatcaccaggttcttcagatcgcgcttgagcagctccttgctggtgtccagaccaatgcctcccagaccggcaacgaaaatcacgttcttgttggtcaaagtaaacgacatggtacctattattgtatgttatagtattagttgcttggtgttatgaaagaaactaagaaaagaaaaataaaataaaaataaaagattgagacaagggaagaaaagatacaaaataagaattaattacaattgcgtttgctataaatacgtttttaacaatcaactctggtaggaagataatgctttttttttttatatatgcttggtgccacttgtcacatacaattctacaaccttcgacaaaaatccaaatgatagtaagatcaaagccagaaagcaatggagaaaaaaaattaatgaaccacgatgaaccaaatgatcaatacaaccaaagaaactaccctagtgaggtgtatgctgacttggtatcacacttcatgaattttgcatatggcaaagtccacgaaagtgggcttcagaaaaaaggcgtgcggtgtgtagatgtatcaattagtggatgccagttttggaacgggattccactttccgcaagttggtgcacgtcgttagtgacataacgccgcgttcatctttgggaagaagcagatgctgagcgaggaggtactatagagtaaagaaccctttctatacccgcagccccatggtaagtgacagtgcagtaataatatgaaccaatttatttttcgttacataaaaatgcttataaaactttaactaataattagagattaaatcgcggccgcaaaagatccttaggatttattctgttcagcaaacagcttgcccattttcttcagtaccttcggtgcgccttctttcgccaggatcagttcgatccagtacatacggttcggatcggcctgggcctctttcatcacgctcacaaattcgttttcggtacgcacaattttagacacaacacggtcctcagttgcgccgaaggactccggcagtttagagtagttccacatagggatatcgttgtaagactggttcggaccgtggatctcacgctcaacggtgtagccgtcattgttaataatgaagcaaatcgggttgatcttttcacgaattgccagacccagttcctgtacggtcagctgcagggaaccgtcaccgatgaacagcagatgacgagattctttatcagcgatctgagagcccagcgctgccgggaaagtatagccaatgctaccccacagcggctgaccgataaaatggcttttggatttcagaaagatagaagacgcgccgaaaaagctcgtaccttgttccgccacgatggtttcattgctctgggtcaggttctccacggcctgccacaggcgatcctgggacagcagtgcgttagatggtacgaaatcttcttgctttttgtcaatgtatttgcctttatactcgatttcggacaggtccagcagagagctgatcaggctttcgaagtcgaagttctggatacgctcgttgaagattttaccctcgtcgatgttcaggctaatcattttgttttcgttcagatggtgagtgaatgcaccggtagaagagtcggtcagtttaacgcccagcatcaggatgaagtccgcagattcaacaaattctttcaggttcggttcgctcagagtaccgttgtagatgcccaggaaagacggcagagcctcgtcaacagaggacttgccgaagttcagggtggtaatcggcagtttggttttgctgatgaattgggtcacggtcttctccagaccaaaagaaatgatttcgtggccggtgatcacgattggtttctttgcgtttttcagagactcctggattttgttcaggatttcctggtcgctagtgttagaagtggagttttctttcttcagcggcaggctcggtttttccgctttagctgccgcaacatccacaggcaggttgatgtaaactggtttgcgttctttcagcagcgcagacagaacgcggtcgatttccacagtagcgttctctgcagtcagcagcgtacgtgccgcagtcacaggttcatgcattttcatgaagtgtttgaaatcgccgtcagccagagtgtggtggacgaatttaccttcgttctgaactttgctcgttgggctgcctacgatctccaccaccggcaggttttcggcgtaggagcccgccagaccgttgacggcgctcagttcgccaacaccgaaagtggtcagaaatgccgcggctttcttggtacgtgcataaccatctgccatgtagcttgcgttcagttcgttagcgttacccacccatttcatgtctttatgagagatgatctgatccaggaactgcagattgtaatcacccggaacgccgaagatttcttcgatacccagttcatgcagacggtccagcagataatcaccaacagtatacatgtcgagcttgttttatatttgttgtaaaaagtagataattacttccttgatgatctgtaaaaaagagaaaaagaaagcatctaagaacttgaaaaactacgaattagaaaagaccaaatatgtatttcttgcattgaccaatttatgcaagtttatatatatgtaaatgtaagtttcacgaggttctactaaactaaaccacccccttggttagaagaaaagagtgtgtgagaacaggctgttgttgtcacacgattcggacaattctgtttgaaagagagagagtaacagtacgatcgaacgaactttgctctggagatcacagtgggcatcatagcatgtggtactaaaccctttcccgccattccagaaccttcgattgcttgttacaaaacctgtgagccgtcgctaggaccttgttgtgtgacgaaattggaagctgcaatcaataggaagacaggaagtcgagcgtgtctgggttttttcagttttgttctttttgcaaacaaatcacgagcgacggtaatttctttctcgataagaggccacgtgctttatgagggtaacatcaattcaagaaggagggaaacacttcctttttctggccctgataatagtatgagggtgaagccaaaataaaggattcgcgcccaaatcggcatctttaaatgcaggtatgcgatagttcctcactctttccttactcacgagtaattcttgcaaatgcctattatgcagatgttataatatctgtgcgtcttgagttgagcctagaattcttagaaaaactcatcgagcatcaaatgaaactgcaatttattcatatcaggattatcaataccatatttttgaaaaagccgtttctgtaatgaaggagaaaactcaccgaggcagttccataggatggcaagatcctggtatcggtctgcgatcccgactcgtccaacatcaatacaacctattaatttcccctcgtcaaaaataaggttatcaagtgagaaatcaccatgagtgacgactgaatccggtgagaatggcaaaagcttatgcatttctttccagacttgttcaacaggccagccattacgctcgtcatcaaaatcactcgcgtcaaccaaaccgttattcattcgtgattgcgcctgagcgaggcgaaatacgcgatcgctgttaaaaggacaattacaaacaggaatcgaatgcaaccggcgcaggaacactgccagcgcatcaacaatattttcacctgaatcaggatattcttctaatacctggaatgctgttttgccggggatcgcagtggtgagtaaccatgcatcatcaggagtacggacaaaatgcttgatggtcggaagaggcataaattccgtcagccagtttagtctgaccatctcatctgcaacatcattggcaacgctacctttgccatgtttcagaaacaactctggcgcatcgggcttcccatacaatcgatagattgtcgcacctgattgcccgacattatcgcgagcccatttatacccatataaatcagcatccatgttggaatttaatcgcggcctcgaaacgtgagtcttttccttacccatactagtttttagtttatgtatgtgttttttgtagttatagatttaagcaagaaaagaatacaaacaaaaaattgaaaaagattgatttagaattaaaaagaaaaatatttacgtaagaagggaaaatagtaaatgttgcaagttcactaaactcctaaattatgctgccctttatattccctgttacagcagccgagccaaaggtatataggctcctttgcattagcatgcgtaacaaaccacctgtcagtttcaaccgaggtggtatccgagagaattgtgtgattgctttaattaatttcggagaatctcacatgccactgaagattaaaaactggatgccagaaaaggggtgtccaggtgtaacatcaatagaggaagctgaaaagtcttagaacgggtaatcttccaccaacctgatgggttcctagatataatctcgaagggaataagtagggtgataccgcagaagtgtctgaatgtattaaggtcctcacagtttaaatcccgctcacactaacgtaggattattataactcaaaaaaatggcattattctaagtaagttaaatatccgtaatctttaaacagcggccgcggatcttcatcctgccactgcaattcttttcatatcggtcatatatcctctcagctttttacccacctgttctatagcatgtgaacgaatagcttcatttacgtctctcagttggccattgtcaaccgctccttccggaatagccttccccaaatcaccaggttgtaactcggccatgaagggctttaacaacgggacacatgcgtagctaaataagtaattaccatattctgcagtgtctgatatgacaacattcatctcgtaaagtctttttcttgcaatagtatttgctatcaaaggcaattcatgcaaagactcatagtatgcagattcttcaatgataccggagtcaaccatagtttcgaatgcaagttctacccctgccttcaccatagctatcatcaatactcccttatcaaagtattcttgttcaccaattttaccttcgtattgtggggctgtctcgaatgccgtcttgccggtttcttctctccacgtcaataactttttatcatcgtttgcccaatctgccatcattcctgaggaaaactcaccggagataatatcgtccatgtgcttttggaataatggtgccatgatctcttttagttgctcagataaggcgtaggctcttagcttggccggatttgaaagtctatccatcatcaatgttatgccaccttgtttaagtgcctcggtgattgtctcccaaccaaattgtatcaacttttcagcataggcaggatctgtaccctcttcgaccaatttatcaaagcatagtaaagaccctgcctgcaacattccgcacagaatggtttgttcacccattaagtcactcttgacctcagctacgaaagaactctctaacacacccgctctatgacctccggttgcggctgcccatgccttcgcaattgccataccttcacctttggggtcattttcaggatgtacggcgatcaatgtaggtacaccaaaacccctcttgtactcctctctgacttccgtacctgggcactttggtgcaaccattacgactgttatatcttttctgatctgctcgcccacttcaacgatattaaagccatgagagtaacctaaagctgccccatccttcatcagcggttgaactgttcttactacgtctgagtgaaccttatctggtgttaggttaatcactaaatctgcctgagggatcagttcttcgtaagtaccaactttgaacccattttccgtcgctttacgccaggaggccctcttttctgcaattgcctctttcctcaatgcatacgaaatatccagacctgaatctctcatgtttaaaccttggtttagaccctgagcaccgcagccaacaattactactttctttccttgcagataagaagcaccatcagcaaactcgtcccttcccataaatctgcacttacccagttgagccaattgttgtctcaaatttaatgtgttaaaatagttggccatctcgagtcgaaactaagttctggtgttttaaaactaaaaaaaagactaactataaaagtagaatttaagaagtttaagaaatagatttacagaattacaatcaatacctaccgtctttatatacttattagtcaagtaggggaataatttcagggaactggtttcaaccttttttttcagctttttccaaatcagagagagcagaaggtaatagaaggtgtaagaaaatgagatagatacatgcgtgggtcaattgccttgtgtcatcatttactccaggcaggttgcatcactccattgaggttgtgcccgttttttgcctgtttgtgcccctgttctctgtagttgcgctaagagaatggacctatgaactgatggttggtgaagaaaacaatattttggtgctgggattctttttttttctggatgccagcttaaaaagcgggctccattatatttagtggatgccaggaataaactgttcacccagacacctacgatgttatatattctgtgtaacccgccccctattttgggcatgtacgggttacagcagaattaaaaggctaattttttgactaaataaagttaggaaaatcactactattaattatttacgtattctttgaaatggcgagtattgataatgataaactggatccgcggccgcttacagatcagtaacacacccttccgatgcaggacgggttaatttagcgaattttgccaaaactcccctggtggctttcggagttggcttctgataattagctcttctctttgcgatttcttcatcggaaactttcagggatatagagttgttgactgcatctatctctattatatcgtcatcttcaactaagccgattagtccaccctcaacggcttcaggcacaatatggccgacaacaaaaccgtgagtgccaccggagaatctaccatccgtaattaacgcgcaacttttccctaaacccgcaccaattaatgctgatgtaggcttcagcatttcgggcataccaggtccgccgacgggacctatattcctaattaccgctacatctccagcatgcaaacgaccagattctatgccgtcgataaaatgttgttcaccatcaaagactctggcagtgcctttgaagaactctccttctttaccgctaatttttgctacggaacccccttgagctaaattaccgtacagaatctgcaagtggccggtggccttgataggattctttagtggcctcatgatatcttgtgagtcgaaatccaagtctagggcagtctcgacattctcggctaatgttttacccgtcacagtaaggcagtcaccatgcaattttccttcctttagaaggtacttaagcactgctggcaagcctccaattttatgcaaatcttccatcatatatttacctgaaggtttaaaatcacctagtactggagtaatgtcactaattctttggaagtcatcctgagttatttcgacacctatcgcgttagccattgcaataatatgcaagacagcattagtactaccccccaagaccatcacaatggtaatagcgttctcgaacgcctccttagtcattatatcactaggcttgatgtctttttccaaaagattcttaatggctaatccaatctcatcacattcttcttgtttttcttgagatactgcagggttcgaagaagaatacggcaatgacatacctagtgtttcgatagcggcagctaaggtattagctgtgtacatccccccacatgccccttgaccaggaatagcattacaaataacaccgtgataatcttcatcagagatattgccggtaattttctggcctagagattcaaaagccgatacgatgttcaatttctcacctttatattcaccgtgttctattgttcctccatacaccataatgcttggcctattaagtcttgccataccaataatagaacctggcatatttttgtcacaacctgggatggctacaattgcatcatagtattcagcgccagcgttggtttcaatagagtcagctataacttctctggaaacaagggagtatctcattcccaactttccatttgctatcccatcagaaactcctatcgtatgaaattgtaagccgatcagaccatctgtctgatttactgagcttttaatctttgatccaagggttcctaaatgcatgttgcatggatttccatcccagtccatcgacactatacccacttgagctttcttgaaatcttcgtctttaaacccgatgccgtaatacattgcctgtgtggcgggttgtgtgggatcttgtgtcaacgttttgctgtacttattcagttcaacagattcaactttgccgttatacttaaactccatgtcgacaaacttagattagattgctatgctttctttctaatgagcaagaagtaaaaaaagttgtaatagaacaagaaaaatgaaactgaaacttgagaaattgaagaccgtttattaacttaaatatcaatgggaggtcatcgaaagagaaaaaaatcaaaaaaaaaattttcaagaaaaagaaacgtgataaaaatttttattgcctttttcgacgaagaaaaagaaacgaggcggtctcttttttcttttccaaacctttagtacgggtaattaacgacaccctagaggaagaaagaggggaaatttagtatgctgtgcttgggtgttttgaagtggtacggcgatgcgcggagtccgagaaaatctggaagagtaaaaaaggagtagaaacattttgaagctatgagctccagcttttgttccctttagtgagggttaattgcgcgcttggcgtaatcatggtcatagctgtttcctgtgtgaaattgttatccgctcacaattccacacaacataggagccggaagcataaagtgtaaagcctggggtgcctaatgagtgaggtaactcacattaattgcgttgcgctcactgcccgctttccagtcgggaaacctgtcgtgccagctgcattaatgaatcggccaacgcgcggggagaggcggtttgcgtattgggcgctcttccgcttcctcgctcactgactcgctgcgctcggtcgttcggctgcggcgagcggtatcagctcactcaaaggcggtaatacggttatccacagaatcaggggataacgcaggaaagaacatgtgagcaaaaggccagcaaaaggccaggaaccgtaaaaaggccgcgttgctggcgtttttccataggctccgcccccctgacgagcatcacaaaaatcgacgctcaagtcagaggtggcgaaacccgacaggactataaagataccaggcgtttccccctggaagctccctcgtgcgctctcctgttccgaccctgccgcttaccggatacctgtccgcctttctcccttcgggaagcgtggcgctttctcatagctcacgctgtaggtatctcagttcggtgtaggtcgttcgctccaagctgggctgtgtgcacgaaccccccgttcagcccgaccgctgcgccttatccggtaactatcgtcttgagtccaacccggtaagacacgacttatcgccactggcagcagccactggtaacaggattagcagagcgaggtatgtaggcggtgctacagagttcttgaagtggtggcctaactacggctacactagaaggacagtatttggtatctgcgctctgctgaagccagttaccttcggaaaaagagttggtagctcttgatccggcaaacaaaccaccgctggtagcggtggtttttttgtttgcaagcagcagattacgcgcagaaaaaaaggatctcaagaagatcctttgatcttttctacggggtctgacgctcagtggaacgaaaactcacgttaagggattttggtcatgagattatcaaaaaggatcttcacctagatccttttaaattaaaaatgaagttttaaatcaatctaaagtatatatgagtaaacttggtctgacagttaccaatgcttaatcagtgaggcacctatctcagcgatctgtctatttcgttcatccatagttgcctgactccccgtcgtgtagataactacgatacgggagggcttaccatctggccccagtgctgcaatgataccgcgagacccacgctcaccggctccagatttatcagcaataaaccagccagccggaagggccgagcgcagaagtggtcctgcaactttatccgcctccatccagtctattaattgttgccgggaagctagagtaagtagttcgccagttaatagtttgcgcaacgttgttgccattgctacaggcatcgtggtgtcacgctcgtcgtttggtatggcttcattcagctccggttcccaacgatcaaggcgagttacatgatcccccatgttgtgcaaaaaagcggttagctccttcggtcctccgatcgttgtcagaagtaagttggccgcagtgttatcactcatggttatggcagcactgcataattctcttactgtcatgccatccgtaagatgcttttctgtgactggtgagtactcaaccaagtcattctgagaatagtgtatgcggcgaccgagttgctcttgcccggcgtcaatacgggataataccgcgccacatagcagaactttaaaagtgctcatcattggaaaacgttcttcggggcgaaaactctcaaggatcttaccgctgttgagatccagttcgatgtaacccactcgtgcacccaactgatcttcagcatcttttactttcaccagcgtttctgggtgagcaaaaacaggaaggcaaaatgccgcaaaaaagggaataagggcgacacggaaatgttgaatactcatactcttcctttttcaatattattgaagcatttatcagggttattgtctcatgagcggatacatatttgaatgtatttagaaaaataaacaaataggggttccgcgcacatttccccgaaaagtgccacctgaacgaagcatctgtgcttcattttgtagaacaaaaatgcaacgcgagagcgctaatttttcaaacaaagaatctgagctgcatttttacagaacagaaatgcaacgcgaaagcgctattttaccaacgaagaatctgtgcttcatttttgtaaaacaaaaatgcaacgcgagagcgctaatttttcaaacaaagaatctgagctgcatttttacagaacagaaatgcaacgcgagagcgctattttaccaacaaagaatctatacttcttttttgttctacaaaaatgcatcccgagagcgctatttttctaacaaagcatcttagattactttttttctcctttgtgcgctctataatgcagtctcttgataactttttgcactgtaggtccgttaaggttagaagaaggctactttggtgtctattttctcttccataaaaaaagcctgactccacttcccgcgtttactgattactagcgaagctgcgggtgcattttttcaagataaaggcatccccgattatattctataccgatgtggattgcgcatactttgtgaacagaaagtgatagcgttgatgattcttcattggtcagaaaattatgaacggtttcttctattttgtctctatatactacgtataggaaatgtttacattttcgtattgttttcgattcactctatgaatagttcttactacaatttttttgtctaaagagtaatactagagataaacataaaaaatgtagaggtcgagtttagatgcaagttcaaggagcgaaaggtggatgggtaggttatatagggatatagcacagagatatatagcaaagagatacttttgagcaatgtttgtggaagcggtattcgcaatattttagtagctcgttacagtccggtgcgtttttggttttttgaaagtgcgtcttcagagcgcttttggttttcaaaagcgctctgaagttcctatactttctagagaataggaacttcggaataggaacttcaaagcgtttccgaaaacgagcgcttccgaaaatgcaacgcgagctgcgcacatacagctcactgttcacgtcgcacctatatctgcgtgttgcctgtatatatatatacatgagaagaacggcatagtgcgtgtttatgcttaaatgcgtacttatatgcgtctatttatgtaggatgaaaggtagtctagtacctcctgtgatattatcccattccatgcggggtatcgtatgcttccttcagcactaccctttagctgttctatatgctgccactcctcaattggattagtctcatccttcaatgctatcatttcctttgata

SEQ ID NO: 123 - DNA, 14056 bp, Artificial Sequence
  Plasmid pGV2227
ttggatcatactaagaaaccattattatcatgacattaacctataaaaataggcgtatcacgaggccctttcgtctcgcgcgtttcggtgatgacggtgaaaacctctgacacatgcagctcccggagacggtcacagcttgtctgtaagcggatgccgggagcagacaagcccgtcagggcgcgtcagcgggtgttggcgggtgtcggggctggcttaactatgcggcatcagagcagattgtactgagagtgcaccataccacagcttttcaattcaattcatcattttttttttattcttttttttgatttcggtttctttgaaatttttttgattcggtaatctccgaacagaaggaagaacgaaggaaggagcacagacttagattggtatatatacgcatatggcaaattaaagccttcgagcgtcccaaaaccttctcaagcaaggttttcagtataatgttacatgcgtacacgcgtctgtacagaaaaaaaagaaaaatttgaaatataaataacgttcttaatactaacataactataaaaaaataaatagggacctagacttcaggttgtctaactccttccttttcggttagagcggatgtggggggagggcgtgaatgtaagcgtgacataactaattacatgactcgacctaggttatttagtaaaatcaatgaccattcggccttcaatttttcctgccttcatttcatcaataatatcattgatttcttccagtttgcgtgtcgcaacaattggttttaccttaccttctgctccaaattgaaaagcttctgccaagtcaagtcttgttccgacaagtgaacctgcaacctccactccgtcaaaaacaactgttggaactgataaagtcatctcagtattgggaagtgccacagcaaccattttgcccataggtttcaaagaagcaaccgcttgttcaaaagcaatccttgcaacagcacaaactattgcactttgcacccctaagccgccagttatttttttaatttcatcaactggatttacatcaccagaattgataatcacatcagctccaatttttttagctaaatttaatttatcttgattaatatcaacagcaattacttttgctccaaaaacatttttagcatattgaattgctaaatttccaagtcctccagcaccaaaaattacttgccaatcaccaggttttactcctgatactttgattgctttgtaagttgttactccagcacaagtaattgagctagcttcaattgggtcaagtccgtcaggaactttgacagcataatcggcaacaacaattgcttcttcagccattccgccatcaactgaatatcctgcatttttaacttctcgacaaaaagtttcattaccagatacacagtattcacagtgaccacatccttcaaagaaccaagccactgaaacccgatcaccaacttgaagcgagcttacatcagctccaatttctttgacaattccaattccttcatgaccaagaacagtccctgctttgttgccataatcacctgctgcaacgtgcaaatcggtatgacagactccacaatactccatgtcaagcaaagcttcattaggtttgattgctcgaagttccttttcaacaaggtccgcataaccatctggattgtgtcttactactgctgctttcattggtacctattattgtatgttatagtattagttgcttggtgttatgaaagaaactaagaaaagaaaaataaaataaaaataaaagattgagacaagggaagaaaagatacaaaataagaattaattacaattgcgtttgctataaatacgtttttaacaatcaactctggtaggaagataatgctttttttttttatatatgcttggtgccacttgtcacatacaattctacaaccttcgacaaaaatccaaatgatagtaagatcaaagccagaaagcaatggagaaaaaaaattaatgaaccacgatgaaccaaatgatcaatacaaccaaagaaactaccctagtgaggtgtatgctgacttggtatcacacttcatgaattttgcatatggcaaagtccacgaaagtgggcttcagaaaaaaggcgtgcggtgtgtagatgtatcaattagtggatgccagttttggaacgggattccactttccgcaagttggtgcacgtcgttagtgacataacgccgcgttcatctttgggaagaagcagatgctgagcgaggaggtactatagagtaaagaaccctttctatacccgcagccccatggtaagtgacagtgcagtaataatatgaaccaatttatttttcgttacataaaaatgcttataaaactttaactaataattagagattaaatcgcggccgcaaaagatccttaggatttattctgttcagcaaacagcttgcccattttcttcagtaccttcggtgcgccttctttcgccaggatcagttcgatccagtacatacggttcggatcggcctgggcctctttcatcacgctcacaaattcgttttcggtacgcacaattttagacacaacacggtcctcagttgcgccgaaggactccggcagtttagagtagttccacatagggatatcgttgtaagactggttcggaccgtggatctcacgctcaacggtgtagccgtcattgttaataatgaagcaaatcgggttgatcttttcacgaattgccagacccagttcctgtacggtcagctgcagggaaccgtcaccgatgaacagcagatgacgagattctttatcagcgatctgagagcccagcgctgccgggaaagtatagccaatgctaccccacagcggctgaccgataaaatggcttttggatttcagaaagatagaagacgcgccgaaaaagctcgtaccttgttccgccacgatggtttcattgctctgggtcaggttctccacggcctgccacaggcgatcctgggacagcagtgcgttagatggtacgaaatcttcttgctttttgtcaatgtatttgcctttatactcgatttcggacaggtccagcagagagctgatcaggctttcgaagtcgaagttctggatacgctcgttgaagattttaccctcgtcgatgttcaggctaatcattttgttttcgttcagatggtgagtgaatgcaccggtagaagagtcggtcagtttaacgcccagcatcaggatgaagtccgcagattcaacaaattctttcaggttcggttcgctcagagtaccgttgtagatgcccaggaaagacggcagagcctcgtcaacagaggacttgccgaagttcagggtggtaatcggcagtttggttttgctgatgaattgggtcacggtcttctccagaccaaaagaaatgatttcgtggccggtgatcacgattggtttctttgcgtttttcagagactcctggattttgttcaggatttcctggtcgctagtgttagaagtggagttttctttcttcagcggcaggctcggtttttccgctttagctgccgcaacatccacaggcaggttgatgtaaactggtttgcgttctttcagcagcgcagacagaacgcggtcgatttccacagtagcgttctctgcagtcagcagcgtacgtgccgcagtcacaggttcatgcattttcatgaagtgtttgaaatcgccgtcagccagagtgtggtggacgaatttaccttcgttctgaactttgctcgttgggctgcctacgatctccaccaccggcaggttttcggcgtaggagcccgccagaccgttgacggcgctcagttcgccaacaccgaaagtggtcagaaatgccgcggctttcttggtacgtgcataaccatctgccatgtagcttgcgttcagttcgttagcgttacccacccatttcatgtctttatgagagatgatctgatccaggaactgcagattgtaatcacccggaacgccgaagatttcttcgatacccagttcatgcagacggtccagcagataatcaccaacagtatacatgtcgagcttgttttatatttgttgtaaaaagtagataattacttccttgatgatctgtaaaaaagagaaaaagaaagcatctaagaacttgaaaaactacgaattagaaaagaccaaatatgtatttcttgcattgaccaatttatgcaagtttatatatatgtaaatgtaagtttcacgaggttctactaaactaaaccacccccttggttagaagaaaagagtgtgtgagaacaggctgttgttgtcacacgattcggacaattctgtttgaaagagagagagtaacagtacgatcgaacgaactttgctctggagatcacagtgggcatcatagcatgtggtactaaaccctttcccgccattccagaaccttcgattgcttgttacaaaacctgtgagccgtcgctaggaccttgttgtgtgacgaaattggaagctgcaatcaataggaagacaggaagtcgagcgtgtctgggttttttcagttttgttctttttgcaaacaaatcacgagcgacggtaatttctttctcgataagaggccacgtgctttatgagggtaacatcaattcaagaaggagggaaacacttcctttttctggccctgataatagtatgagggtgaagccaaaataaaggattcgcgcccaaatcggcatctttaaatgcaggtatgcgatagttcctcactctttccttactcacgagtaattcttgcaaatgcctattatgcagatgttataatatctgtgcgtcttgagttgagcctagaattcttagaaaaactcatcgagcatcaaatgaaactgcaatttattcatatcaggattatcaataccatatttttgaaaaagccgtttctgtaatgaaggagaaaactcaccgaggcagttccataggatggcaagatcctggtatcggtctgcgatcccgactcgtccaacatcaatacaacctattaatttcccctcgtcaaaaataaggttatcaagtgagaaatcaccatgagtgacgactgaatccggtgagaatggcaaaagcttatgcatttctttccagacttgttcaacaggccagccattacgctcgtcatcaaaatcactcgcgtcaaccaaaccgttattcattcgtgattgcgcctgagcgaggcgaaatacgcgatcgctgttaaaaggacaattacaaacaggaatcgaatgcaaccggcgcaggaacactgccagcgcatcaacaatattttcacctgaatcaggatattcttctaatacctggaatgctgttttgccggggatcgcagtggtgagtaaccatgcatcatcaggagtacggacaaaatgcttgatggtcggaagaggcataaattccgtcagccagtttagtctgaccatctcatctgcaacatcattggcaacgctacctttgccatgtttcagaaacaactctggcgcatcgggcttcccatacaatcgatagattgtcgcacctgattgcccgacattatcgcgagcccatttatacccatataaatcagcatccatgttggaatttaatcgcggcctcgaaacgtgagtcttttccttacccatactagtttttagtttatgtatgtgttttttgtagttatagatttaagcaagaaaagaatacaaacaaaaaattgaaaaagattgatttagaattaaaaagaaaaatatttacgtaagaagggaaaatagtaaatgttgcaagttcactaaactcctaaattatgctgccctttatattccctgttacagcagccgagccaaaggtatataggctcctttgcattagcatgcgtaacaaaccacctgtcagtttcaaccgaggtggtatccgagagaattgtgtgattgctttaattaatttcggagaatctcacatgccactgaagattaaaaactggatgccagaaaaggggtgtccaggtgtaacatcaatagaggaagctgaaaagtcttagaacgggtaatcttccaccaacctgatgggttcctagatataatctcgaagggaataagtagggtgataccgcagaagtgtctgaatgtattaaggtcctcacagtttaaatcccgctcacactaacgtaggattattataactcaaaaaaatggcattattctaagtaagttaaatatccgtaatctttaaacagcggccgcggatcttcatcctgccactgcaattcttttcatatcggtcatatatcctctcagctttttacccacctgttctatagcatgtgaacgaatagcttcatttacgtctctcagttggccattgtcaaccgctccttccggaatagccttccccaaatcaccaggttgtaactcggccatgaagggctttaacaacgggacacatgcgtagctaaataagtaattaccatattctgcagtgtctgatatgacaacattcatctcgtaaagtctttttcttgcaatagtatttgctatcaaaggcaattcatgcaaagactcatagtatgcagattcttcaatgataccggagtcaaccatagtttcgaatgcaagttctacccctgccttcaccatagctatcatcaatactcccttatcaaagtattcttgttcaccaattttaccttcgtattgtggggctgtctcgaatgccgtcttgccggtttcttctctccacgtcaataactttttatcatcgtttgcccaatctgccatcattcctgaggaaaactcaccggagataatatcgtccatgtgcttttggaataatggtgccatgatctcttttagttgctcagataaggcgtaggctcttagcttggccggatttgaaagtctatccatcatcaatgttatgccaccttgtttaagtgcctcggtgattgtctcccaaccaaattgtatcaacttttcagcataggcaggatctgtaccctcttcgaccaatttatcaaagcatagtaaagaccctgcctgcaacattccgcacagaatggtttgttcacccattaagtcactcttgacctcagctacgaaagaactctctaacacacccgctctatgacctccggttgcggctgcccatgccttcgcaattgccataccttcacctttggggtcattttcaggatgtacggcgatcaatgtaggtacaccaaaacccctcttgtactcctctctgacttccgtacctgggcactttggtgcaaccattacgactgttatatcttttctgatctgctcgcccacttcaacgatattaaagccatgagagtaacctaaagctgccccatccttcatcagcggttgaactgttcttactacgtctgagtgaaccttatctggtgttaggttaatcactaaatctgcctgagggatcagttcttcgtaagtaccaactttgaacccattttccgtcgctttacgccaggaggccctcttttctgcaattgcctctttcctcaatgcatacgaaatatccagacctgaatctctcatgtttaaaccttggtttagaccctgagcaccgcagccaacaattactactttctttccttgcagataagaagcaccatcagcaaactcgtcccttcccataaatctgcacttacccagttgagccaattgttgtctcaaatttaatgtgttaaaatagttggccatctcgagtcgaaactaagttctggtgttttaaaactaaaaaaaagactaactataaaagtagaatttaagaagtttaagaaatagatttacagaattacaatcaatacctaccgtctttatatacttattagtcaagtaggggaataatttcagggaactggtttcaaccttttttttcagctttttccaaatcagagagagcagaaggtaatagaaggtgtaagaaaatgagatagatacatgcgtgggtcaattgccttgtgtcatcatttactccaggcaggttgcatcactccattgaggttgtgcccgttttttgcctgtttgtgcccctgttctctgtagttgcgctaagagaatggacctatgaactgatggttggtgaagaaaacaatattttggtgctgggattctttttttttctggatgccagcttaaaaagcgggctccattatatttagtggatgccaggaataaactgttcacccagacacctacgatgttatatattctgtgtaacccgccccctattttgggcatgtacgggttacagcagaattaaaaggctaattttttgactaaataaagttaggaaaatcactactattaattatttacgtattctttgaaatggcgagtattgataatgataaactggatccgcggccgcttacagatcagtaacacacccttccgatgcaggacgggttaatttagcgaattttgccaaaactcccctggtggctttcggagttggcttctgataattagctcttctctttgcgatttcttcatcggaaactttcagggatatagagttgttgactgcatctatctctattatatcgtcatcttcaactaagccgattagtccaccctcaacggcttcaggcacaatatggccgacaacaaaaccgtgagtgccaccggagaatctaccatccgtaattaacgcgcaacttttccctaaacccgcaccaattaatgctgatgtaggcttcagcatttcgggcataccaggtccgccgacgggacctatattcctaattaccgctacatctccagcatgcaaacgaccagattctatgccgtcgataaaatgttgttcaccatcaaagactctggcagtgcctttgaagaactctccttctttaccgctaatttttgctacggaacccccttgagctaaattaccgtacagaatctgcaagtggccggtggccttgataggattctttagtggcctcatgatatcttgtgagtcgaaatccaagtctagggcagtctcgacattctcggctaatgttttacccgtcacagtaaggcagtcaccatgcaattttccttcctttagaaggtacttaagcactgctggcaagcctccaattttatgcaaatcttccatcatatatttacctgaaggtttaaaatcacctagtactggagtaatgtcactaattctttggaagtcatcctgagttatttcgacacctatcgcgttagccattgcaataatatgcaagacagcattagtactaccccccaagaccatcacaatggtaatagcgttctcgaacgcctccttagtcattatatcactaggcttgatgtctttttccaaaagattcttaatggctaatccaatctcatcacattcttcttgtttttcttgagatactgcagggttcgaagaagaatacggcaatgacatacctagtgtttcgatagcggcagctaaggtattagctgtgtacatccccccacatgccccttgaccaggaatagcattacaaataacaccgtgataatcttcatcagagatattgccggtaattttctggcctagagattcaaaagccgatacgatgttcaatttctcacctttatattcaccgtgttctattgttcctccatacaccataatgcttggcctattaagtcttgccataccaataatagaacctggcatatttttgtcacaacctgggatggctacaattgcatcatagtattcagcgccagcgttggtttcaatagagtcagctataacttctctggaaacaagggagtatctcattcccaactttccatttgctatcccatcagaaactcctatcgtatgaaattgtaagccgatcagaccatctgtctgatttactgagcttttaatctttgatccaagggttcctaaatgcatgttgcatggatttccatcccagtccatcgacactatacccacttgagctttcttgaaatcttcgtctttaaacccgatgccgtaatacattgcctgtgtggcgggttgtgtgggatcttgtgtcaacgttttgctgtacttattcagttcaacagattcaactttgccgttatacttaaactccatgtcgacaaacttagattagattgctatgctttctttctaatgagcaagaagtaaaaaaagttgtaatagaacaagaaaaatgaaactgaaacttgagaaattgaagaccgtttattaacttaaatatcaatgggaggtcatcgaaagagaaaaaaatcaaaaaaaaaattttcaagaaaaagaaacgtgataaaaatttttattgcctttttcgacgaagaaaaagaaacgaggcggtctcttttttcttttccaaacctttagtacgggtaattaacgacaccctagaggaagaaagaggggaaatttagtatgctgtgcttgggtgttttgaagtggtacggcgatgcgcggagtccgagaaaatctggaagagtaaaaaaggagtagaaacattttgaagctatgagctccagcttttgttccctttagtgagggttaattgcgcgcttggcgtaatcatggtcatagctgtttcctgtgtgaaattgttatccgctcacaattccacacaacataggagccggaagcataaagtgtaaagcctggggtgcctaatgagtgaggtaactcacattaattgcgttgcgctcactgcccgctttccagtcgggaaacctgtcgtgccagctgcattaatgaatcggccaacgcgcggggagaggcggtttgcgtattgggcgctcttccgcttcctcgctcactgactcgctgcgctcggtcgttcggctgcggcgagcggtatcagctcactcaaaggcggtaatacggttatccacagaatcaggggataacgcaggaaagaacatgtgagcaaaaggccagcaaaaggccaggaaccgtaaaaaggccgcgttgctggcgtttttccataggctccgcccccctgacgagcatcacaaaaatcgacgctcaagtcagaggtggcgaaacccgacaggactataaagataccaggcgtttccccctggaagctccctcgtgcgctctcctgttccgaccctgccgcttaccggatacctgtccgcctttctcccttcgggaagcgtggcgctttctcatagctcacgctgtaggtatctcagttcggtgtaggtcgttcgctccaagctgggctgtgtgcacgaaccccccgttcagcccgaccgctgcgccttatccggtaactatcgtcttgagtccaacccggtaagacacgacttatcgccactggcagcagccactggtaacaggattagcagagcgaggtatgtaggcggtgctacagagttcttgaagtggtggcctaactacggctacactagaaggacagtatttggtatctgcgctctgctgaagccagttaccttcggaaaaagagttggtagctcttgatccggcaaacaaaccaccgctggtagcggtggtttttttgtttgcaagcagcagattacgcgcagaaaaaaaggatctcaagaagatcctttgatcttttctacggggtctgacgctcagtggaacgaaaactcacgttaagggattttggtcatgagattatcaaaaaggatcttcacctagatccttttaaattaaaaatgaagttttaaatcaatctaaagtatatatgagtaaacttggtctgacagttaccaatgcttaatcagtgaggcacctatctcagcgatctgtctatttcgttcatccatagttgcctgactccccgtcgtgtagataactacgatacgggagggcttaccatctggccccagtgctgcaatgataccgcgagacccacgctcaccggctccagatttatcagcaataaaccagccagccggaagggccgagcgcagaagtggtcctgcaactttatccgcctccatccagtctattaattgttgccgggaagctagagtaagtagttcgccagttaatagtttgcgcaacgttgttgccattgctacaggcatcgtggtgtcacgctcgtcgtttggtatggcttcattcagctccggttcccaacgatcaaggcgagttacatgatcccccatgttgtgcaaaaaagcggttagctccttcggtcctccgatcgttgtcagaagtaagttggccgcagtgttatcactcatggttatggcagcactgcataattctcttactgtcatgccatccgtaagatgcttttctgtgactggtgagtactcaaccaagtcattctgagaatagtgtatgcggcgaccgagttgctcttgcccggcgtcaatacgggataataccgcgccacatagcagaactttaaaagtgctcatcattggaaaacgttcttcggggcgaaaactctcaaggatcttaccgctgttgagatccagttcgatgtaacccactcgtgcacccaactgatcttcagcatcttttactttcaccagcgtttctgggtgagcaaaaacaggaaggcaaaatgccgcaaaaaagggaataagggcgacacggaaatgttgaatactcatactcttcctttttcaatattattgaagcatttatcagggttattgtctcatgagcggatacatatttgaatgtatttagaaaaataaacaaataggggttccgcgcacatttccccgaaaagtgccacctgaacgaagcatctgtgcttcattttgtagaacaaaaatgcaacgcgagagcgctaatttttcaaacaaagaatctgagctgcatttttacagaacagaaatgcaacgcgaaagcgctattttaccaacgaagaatctgtgcttcatttttgtaaaacaaaaatgcaacgcgagagcgctaatttttcaaacaaagaatctgagctgcatttttacagaacagaaatgcaacgcgagagcgctattttaccaacaaagaatctatacttcttttttgttctacaaaaatgcatcccgagagcgctatttttctaacaaagcatcttagattactttttttctcctttgtgcgctctataatgcagtctcttgataactttttgcactgtaggtccgttaaggttagaagaaggctactttggtgtctattttctcttccataaaaaaagcctgactccacttcccgcgtttactgattactagcgaagctgcgggtgcattttttcaagataaaggcatccccgattatattctataccgatgtggattgcgcatactttgtgaacagaaagtgatagcgttgatgattcttcattggtcagaaaattatgaacggtttcttctattttgtctctatatactacgtataggaaatgtttacattttcgtattgttttcgattcactctatgaatagttcttactacaatttttttgtctaaagagtaatactagagataaacataaaaaatgtagaggtcgagtttagatgcaagttcaaggagcgaaaggtggatgggtaggttatatagggatatagcacagagatatatagcaaagagatacttttgagcaatgtttgtggaagcggtattcgcaatattttagtagctcgttacagtccggtgcgtttttggttttttgaaagtgcgtcttcagagcgcttttggttttcaaaagcgctctgaagttcctatactttctagagaataggaacttcggaataggaacttcaaagcgtttccgaaaacgagcgcttccgaaaatgcaacgcgagctgcgcacatacagctcactgttcacgtcgcacctatatctgcgtgttgcctgtatatatatatacatgagaagaacggcatagtgcgtgtttatgcttaaatgcgtacttatatgcgtctatttatgtaggatgaaaggtagtctagtacctcctgtgatattatcccattccatgcggggtatcgtatgcttccttcagcactaccctttagctgttctatatgctgccactcctcaattggattagtctcatccttcaatgctatcatttcctttgata

SEQ ID NO: 124 - DNA, 7795 bp, Artificial Sequence
  Plasmid pGV2241
ttggatcatactaagaaaccattattatcatgacattaacctataaaaataggcgtatcacgaggccctttcgtctcgcgcgtttcggtgatgacggtgaaaacctctgacacatgcagctcccggagacggtcacagcttgtctgtaagcggatgccgggagcagacaagcccgtcagggcgcgtcagcgggtgttggcgggtgtcggggctggcttaactatgcggcatcagagcagattgtactgagagtgcaccataccacagcttttcaattcaattcatcattttttttttattcttttttttgatttcggtttctttgaaatttttttgattcggtaatctccgaacagaaggaagaacgaaggaaggagcacagacttagattggtatatatacgcatatgtagtgttgaagaaacatgaaattgcccagtattcttaacccaactgcacagaacaaaaacctgcaggaaacgaagataaatcatgtcgaaagctacatataaggaacgtgctgctactcatcctagtcctgttgctgccaagctatttaatatcatgcacgaaaagcaaacaaacttgtgtgcttcattggatgttcgtaccaccaaggaattactggagttagttgaagcattaggtcccaaaatttgtttactaaaaacacatgtggatatcttgactgatttttccatggagggcacagttaagccgctaaaggcattatccgccaagtacaattttttactcttcgaagacagaaaatttgctgacattggtaatacagtcaaattgcagtactctgcgggtgtatacagaatagcagaatgggcagacattacgaatgcacacggtgtggtgggcccaggtattgttagcggtttgaagcaggcggcagaagaagtaacaaaggaacctagaggccttttgatgttagcagaattgtcatgcaagggctccctatctactggagaatatactaagggtactgttgacattgcgaagagcgacaaagattttgttatcggctttattgctcaaagagacatgggtggaagagatgaaggttacgattggttgattatgacacccggtgtgggtttagatgacaagggagacgcattgggtcaacagtatagaaccgtggatgatgtggtctctacaggatctgacattattattgttggaagaggactatttgcaaagggaagggatgctaaggtagagggtgaacgttacagaaaagcaggctgggaagcatatttgagaagatgcggccagcaaaactaaaaaactgtattataagtaaatgcatgtatactaaactcacaaattagagcttcaatttaattatatcagttattaccctatgcggtgtgaaataccgcacagatgcgtaaggagaaaataccgcatcaggaaattgtaaacgttaatattttgttaaaattcgcgttaaatttttgttaaatcagctcattttttaaccaataggccgaaatcggcaaaatcccttataaatcaaaagaatagaccgagatagggttgagtgttgttccagtttggaacaagagtccactattaaagaacgtggactccaacgtcaaagggcgaaaaaccgtctatcagggcgatggcccactacgtgaaccatcaccctaatcaagttttttggggtcgaggtgccgtaaagcactaaatcggaaccctaaagggagcccccgatttagagcttgacggggaaagccggcgaacgtggcgagaaaggaagggaagaaagcgaaaggagcgggcgctagggcgctggcaagtgtagcggtcacgctgcgcgtaaccaccacacccgccgcgcttaatgcgccgctacagggcgcgtcgcgccattcgccattcaggctgcgcaactgttgggaagggcgatcggtgcgggcctcttcgctattacgccagctggcgaaagggggatgtgctgcaaggcgattaagttgggtaacgccagggttttcccagtcacgacgttgtaaaacgacggccagtgagcgcgcgtaatacgactcactatagggcgaattgggtaccggccgcaaattaaagccttcgagcgtcccaaaaccttctcaagcaaggttttcagtataatgttacatgcgtacacgcgtctgtacagaaaaaaaagaaaaatttgaaatataaataacgttcttaatactaacataactataaaaaaataaatagggacctagacttcaggttgtctaactccttccttttcggttagagcggatgtggggggagggcgtgaatgtaagcgtgacataactaattacatgacgccgcggatccttagtggtggtggtggtggtgtcctgccactgcaattcttttcatatcggtcatatatcctctcagctttttacccacctgttctatagcatgtgaacgaatagcttcatttacgtctctcagttggccattgtcaaccgctccttccggaatagccttccccaaatcaccaggttgtaactcggccatgaagggctttaacaacgggacacatgcgtagctaaataagtaattaccatattctgcagtgtctgatatgacaacattcatctcgtaaagtctttttcttgcaatagtatttgctatcaaaggcaattcatgcaaagactcatagtatgcagattcttcaatgataccggagtcaaccatagtttcgaatgcaagttctacccctgccttcaccatagctatcatcaatactcccttatcaaagtattcttgttcaccaattttaccttcgtattgtggggctgtctcgaatgccgtcttgccggtttcttctctccacgtcaataactttttatcatcgtttgcccaatctgccatcattcctgaggaaaactcaccggagataatatcgtccatgtgcttttggaataatggtgccatgatctcttttagttgctcagataaggcgtaggctcttagcttggccggatttgaaagtctatccatcatcaatgttatgccaccttgtttaagtgcctcggtgattgtctcccaaccaaattgtatcaacttttcagcataggcaggatctgtaccctcttcgaccaatttatcaaagcatagtaaagaccctgcctgcaacattccgcacagaatggtttgttcacccattaagtcactcttgacctcagctacgaaagaactctctaacacacccgctctatgacctccggttgcggctgcccatgccttcgcaattgccataccttcacctttggggtcattttcaggatgtacggcgatcaatgtaggtacaccaaaacccctcttgtactcctctctgacttccgtacctgggcactttggtgcaaccattacgactgttatatcttttctgatctgctcgcccacttcaacgatattaaagccatgagagtaacctaaagctgccccatccttcatcagcggttgaactgttcttactacgtctgagtgaaccttatctggtgttaggttaatcactaaatctgcctgagggatcagttcttcgtaagtaccaactttgaacccattttccgtcgctttacgccaatcggcatccttttctgcaatagactctttcctcaatgcatacgaaatatccagacctgaatctctcatgtttaaaccttggtttagaccctgagcaccgcagccaacaattactactttctttccttgcagataagaagcaccatcagcaaactcgtcccttcccataaatctgcacttacccagttgagccaattgttgtctcaaatttaatgtgttaaaatagttggccatgtcgacaaacttagattagattgctatgctttctttctaatgagcaagaagtaaaaaaagttgtaatagaacaagaaaaatgaaactgaaacttgagaaattgaagaccgtttattaacttaaatatcaatgggaggtcatcgaaagagaaaaaaatcaaaaaaaaaattttcaagaaaaagaaacgtgataaaaatttttattgcctttttcgacgaagaaaaagaaacgaggcggtctcttttttcttttccaaacctttagtacgggtaattaacgacaccctagaggaagaaagaggggaaatttagtatgctgtgcttgggtgttttgaagtggtacggcgatgcgcggagtccgagaaaatctggaagagtaaaaaaggagtagaaacattttgaagctatgagctccagcttttgttccctttagtgagggttaattgcgcgcttggcgtaatcatggtcatagctgtttcctgtgtgaaattgttatccgctcacaattccacacaacataggagccggaagcataaagtgtaaagcctggggtgcctaatgagtgaggtaactcacattaattgcgttgcgctcactgcccgctttccagtcgggaaacctgtcgtgccagctgcattaatgaatcggccaacgcgcggggagaggcggtttgcgtattgggcgctcttccgcttcctcgctcactgactcgctgcgctcggtcgttcggctgcggcgagcggtatcagctcactcaaaggcggtaatacggttatccacagaatcaggggataacgcaggaaagaacatgtgagcaaaaggccagcaaaaggccaggaaccgtaaaaaggccgcgttgctggcgtttttccataggctccgcccccctgacgagcatcacaaaaatcgacgctcaagtcagaggtggcgaaacccgacaggactataaagataccaggcgtttccccctggaagctccctcgtgcgctctcctgttccgaccctgccgcttaccggatacctgtccgcctttctcccttcgggaagcgtggcgctttctcatagctcacgctgtaggtatctcagttcggtgtaggtcgttcgctccaagctgggctgtgtgcacgaaccccccgttcagcccgaccgctgcgccttatccggtaactatcgtcttgagtccaacccggtaagacacgacttatcgccactggcagcagccactggtaacaggattagcagagcgaggtatgtaggcggtgctacagagttcttgaagtggtggcctaactacggctacactagaaggacagtatttggtatctgcgctctgctgaagccagttaccttcggaaaaagagttggtagctcttgatccggcaaacaaaccaccgctggtagcggtggtttttttgtttgcaagcagcagattacgcgcagaaaaaaaggatctcaagaagatcctttgatcttttctacggggtctgacgctcagtggaacgaaaactcacgttaagggattttggtcatgagattatcaaaaaggatcttcacctagatccttttaaattaaaaatgaagttttaaatcaatctaaagtatatatgagtaaacttggtctgacagttaccaatgcttaatcagtgaggcacctatctcagcgatctgtctatttcgttcatccatagttgcctgactccccgtcgtgtagataactacgatacgggagggcttaccatctggccccagtgctgcaatgataccgcgagacccacgctcaccggctccagatttatcagcaataaaccagccagccggaagggccgagcgcagaagtggtcctgcaactttatccgcctccatccagtctattaattgttgccgggaagctagagtaagtagttcgccagttaatagtttgcgcaacgttgttgccattgctacaggcatcgtggtgtcacgctcgtcgtttggtatggcttcattcagctccggttcccaacgatcaaggcgagttacatgatcccccatgttgtgcaaaaaagcggttagctccttcggtcctccgatcgttgtcagaagtaagttggccgcagtgttatcactcatggttatggcagcactgcataattctcttactgtcatgccatccgtaagatgcttttctgtgactggtgagtactcaaccaagtcattctgagaatagtgtatgcggcgaccgagttgctcttgcccggcgtcaatacgggataataccgcgccacatagcagaactttaaaagtgctcatcattggaaaacgttcttcggggcgaaaactctcaaggatcttaccgctgttgagatccagttcgatgtaacccactcgtgcacccaactgatcttcagcatcttttactttcaccagcgtttctgggtgagcaaaaacaggaaggcaaaatgccgcaaaaaagggaataagggcgacacggaaatgttgaatactcatactcttcctttttcaatattattgaagcatttatcagggttattgtctcatgagcggatacatatttgaatgtatttagaaaaataaacaaataggggttccgcgcacatttccccgaaaagtgccacctgaacgaagcatctgtgcttcattttgtagaacaaaaatgcaacgcgagagcgctaatttttcaaacaaagaatctgagctgcatttttacagaacagaaatgcaacgcgaaagcgctattttaccaacgaagaatctgtgcttcatttttgtaaaacaaaaatgcaacgcgagagcgctaatttttcaaacaaagaatctgagctgcatttttacagaacagaaatgcaacgcgagagcgctattttaccaacaaagaatctatacttcttttttgttctacaaaaatgcatcccgagagcgctatttttctaacaaagcatcttagattactttttttctcctttgtgcgctctataatgcagtctcttgataactttttgcactgtaggtccgttaaggttagaagaaggctactttggtgtctattttctcttccataaaaaaagcctgactccacttcccgcgtttactgattactagcgaagctgcgggtgcattttttcaagataaaggcatccccgattatattctataccgatgtggattgcgcatactttgtgaacagaaagtgatagcgttgatgattcttcattggtcagaaaattatgaacggtttcttctattttgtctctatatactacgtataggaaatgtttacattttcgtattgttttcgattcactctatgaatagttcttactacaatttttttgtctaaagagtaatactagagataaacataaaaaatgtagaggtcgagtttagatgcaagttcaaggagcgaaaggtggatgggtaggttatatagggatatagcacagagatatatagcaaagagatacttttgagcaatgtttgtggaagcggtattcgcaatattttagtagctcgttacagtccggtgcgtttttggttttttgaaagtgcgtcttcagagcgcttttggttttcaaaagcgctctgaagttcctatactttctagagaataggaacttcggaataggaacttcaaagcgtttccgaaaacgagcgcttccgaaaatgcaacgcgagctgcgcacatacagctcactgttcacgtcgcacctatatctgcgtgttgcctgtatatatatatacatgagaagaacggcatagtgcgtgtttatgcttaaatgcgtacttatatgcgtctatttatgtaggatgaaaggtagtctagtacctcctgtgatattatcccattccatgcggggtatcgtatgcttccttcagcactaccctttagctgttctatatgctgccactcctcaattggattagtctcatccttcaatgctatcatttcctttgata

SEQ ID NO: 125 - DNA, 14056 bp, Artificial Sequence
  Plasmid pGV2242
ttggatcatactaagaaaccattattatcatgacattaacctataaaaataggcgtatcacgaggccctttcgtctcgcgcgtttcggtgatgacggtgaaaacctctgacacatgcagctcccggagacggtcacagcttgtctgtaagcggatgccgggagcagacaagcccgtcagggcgcgtcagcgggtgttggcgggtgtcggggctggcttaactatgcggcatcagagcagattgtactgagagtgcaccataccacagcttttcaattcaattcatcattttttttttattcttttttttgatttcggtttctttgaaatttttttgattcggtaatctccgaacagaaggaagaacgaaggaaggagcacagacttagattggtatatatacgcatatggcaaattaaagccttcgagcgtcccaaaaccttctcaagcaaggttttcagtataatgttacatgcgtacacgcgtctgtacagaaaaaaaagaaaaatttgaaatataaataacgttcttaatactaacataactataaaaaaataaatagggacctagacttcaggttgtctaactccttccttttcggttagagcggatgtggggggagggcgtgaatgtaagcgtgacataactaattacatgactcgacctaggttatttagtaaaatcaatgaccattcggccttcaatttttcctgccttcatttcatcaataatatcattgatttcttccagtttgcgtgtcgcaacaattggttttaccttaccttctgctccaaattgaaaagcttctgccaagtcaagtcttgttccgacaagtgaacctgcaacctccactccgtcaaaaacaactgttggaactgataaagtcatctcagtattgggaagtgccacagcaaccattttgcccataggtttcaaagaagcaaccgcttgttcaaaagcaatccttgcaacagcacaaactattgcactttgcacccctaagccgccagttatttttttaatttcatcaactggatttacatcaccagaattgataatcacatcagctccaatttttttagctaaatttaatttatcttgattaatatcaacagcaattacttttgctccaaaaacatttttagcatattgaattgctaaatttccaagtcctccagcaccaaaaattacttgccaatcaccaggttttactcctgatactttgattgctttgtaagttgttactccagcacaagtaattgagctagcttcaattgggtcaagtccgtcaggaactttgacagcataatcggcaacaacaattgcttcttcagccattccgccatcaactgaatatcctgcatttttaacttctcgacaaaaagtttcattaccagatacacagtattcacagtgaccacatccttcaaagaaccaagccactgaaacccgatcaccaacttgaagcgagcttacatcagctccaatttctttgacaattccaattccttcatgaccaagaacagtccctgctttgttgccataatcacctgctgcaacgtgcaaatcggtatgacagactccacaatactccatgtcaagcaaagcttcattaggtttgattgctcgaagttccttttcaacaaggtccgcataaccatctggattgtgtcttactactgctgctttcattggtacctattattgtatgttatagtattagttgcttggtgttatgaaagaaactaagaaaagaaaaataaaataaaaataaaagattgagacaagggaagaaaagatacaaaataagaattaattacaattgcgtttgctataaatacgtttttaacaatcaactctggtaggaagataatgctttttttttttatatatgcttggtgccacttgtcacatacaattctacaaccttcgacaaaaatccaaatgatagtaagatcaaagccagaaagcaatggagaaaaaaaattaatgaaccacgatgaaccaaatgatcaatacaaccaaagaaactaccctagtgaggtgtatgctgacttggtatcacacttcatgaattttgcatatggcaaagtccacgaaagtgggcttcagaaaaaaggcgtgcggtgtgtagatgtatcaattagtggatgccagttttggaacgggattccactttccgcaagttggtgcacgtcgttagtgacataacgccgcgttcatctttgggaagaagcagatgctgagcgaggaggtactatagagtaaagaaccctttctatacccgcagccccatggtaagtgacagtgcagtaataatatgaaccaatttatttttcgttacataaaaatgcttataaaactttaactaataattagagattaaatcgcggccgcaaaagatccttaggatttattctgttcagcaaacagcttgcccattttcttcagtaccttcggtgcgccttctttcgccaggatcagttcgatccagtacatacggttcggatcggcctgggcctctttcatcacgctcacaaattcgttttcggtacgcacaattttagacacaacacggtcctcagttgcgccgaaggactccggcagtttagagtagttccacatagggatatcgttgtaagactggttcggaccgtggatctcacgctcaacggtgtagccgtcattgttaataatgaagcaaatcgggttgatcttttcacgaattgccagacccagttcctgtacggtcagctgcagggaaccgtcaccgatgaacagcagatgacgagattctttatcagcgatctgagagcccagcgctgccgggaaagtatagccaatgctaccccacagcggctgaccgataaaatggcttttggatttcagaaagatagaagacgcgccgaaaaagctcgtaccttgttccgccacgatggtttcattgctctgggtcaggttctccacggcctgccacaggcgatcctgggacagcagtgcgttagatggtacgaaatcttcttgctttttgtcaatgtatttgcctttatactcgatttcggacaggtccagcagagagctgatcaggctttcgaagtcgaagttctggatacgctcgttgaagattttaccctcgtcgatgttcaggctaatcattttgttttcgttcagatggtgagtgaatgcaccggtagaagagtcggtcagtttaacgcccagcatcaggatgaagtccgcagattcaacaaattctttcaggttcggttcgctcagagtaccgttgtagatgcccaggaaagacggcagagcctcgtcaacagaggacttgccgaagttcagggtggtaatcggcagtttggttttgctgatgaattgggtcacggtcttctccagaccaaaagaaatgatttcgtggccggtgatcacgattggtttctttgcgtttttcagagactcctggattttgttcaggatttcctggtcgctagtgttagaagtggagttttctttcttcagcggcaggctcggtttttccgctttagctgccgcaacatccacaggcaggttgatgtaaactggtttgcgttctttcagcagcgcagacagaacgcggtcgatttccacagtagcgttctctgcagtcagcagcgtacgtgccgcagtcacaggttcatgcattttcatgaagtgtttgaaatcgccgtcagccagagtgtggtggacgaatttaccttcgttctgaactttgctcgttgggctgcctacgatctccaccaccggcaggttttcggcgtaggagcccgccagaccgttgacggcgctcagttcgccaacaccgaaagtggtcagaaatgccgcggctttcttggtacgtgcataaccatctgccatgtagcttgcgttcagttcgttagcgttacccacccatttcatgtctttatgagagatgatctgatccaggaactgcagattgtaatcacccggaacgccgaagatttcttcgatacccagttcatgcagacggtccagcagataatcaccaacagtatacatgtcgagcttgttttatatttgttgtaaaaagtagataattacttccttgatgatctgtaaaaaagagaaaaagaaagcatctaagaacttgaaaaactacgaattagaaaagaccaaatatgtatttcttgcattgaccaatttatgcaagtttatatatatgtaaatgtaagtttcacgaggttctactaaactaaaccacccccttggttagaagaaaagagtgtgtgagaacaggctgttgttgtcacacgattcggacaattctgtttgaaagagagagagtaacagtacgatcgaacgaactttgctctggagatcacagtgggcatcatagcatgtggtactaaaccctttcccgccattccagaaccttcgattgcttgttacaaaacctgtgagccgtcgctaggaccttgttgtgtgacgaaattggaagctgcaatcaataggaagacaggaagtcgagcgtgtctgggttttttcagttttgttctttttgcaaacaaatcacgagcgacggtaatttctttctcgataagaggccacgtgctttatgagggtaacatcaattcaagaaggagggaaacacttcctttttctggccctgataatagtatgagggtgaagccaaaataaaggattcgcgcccaaatcggcatctttaaatgcaggtatgcgatagttcctcactctttccttactcacgagtaattcttgcaaatgcctattatgcagatgttataatatctgtgcgtcttgagttgagcctagaattcttagaaaaactcatcgagcatcaaatgaaactgcaatttattcatatcaggattatcaataccatatttttgaaaaagccgtttctgtaatgaaggagaaaactcaccgaggcagttccataggatggcaagatcctggtatcggtctgcgatcccgactcgtccaacatcaatacaacctattaatttcccctcgtcaaaaataaggttatcaagtgagaaatcaccatgagtgacgactgaatccggtgagaatggcaaaagcttatgcatttctttccagacttgttcaacaggccagccattacgctcgtcatcaaaatcactcgcgtcaaccaaaccgttattcattcgtgattgcgcctgagcgaggcgaaatacgcgatcgctgttaaaaggacaattacaaacaggaatcgaatgcaaccggcgcaggaacactgccagcgcatcaacaatattttcacctgaatcaggatattcttctaatacctggaatgctgttttgccggggatcgcagtggtgagtaaccatgcatcatcaggagtacggacaaaatgcttgatggtcggaagaggcataaattccgtcagccagtttagtctgaccatctcatctgcaacatcattggcaacgctacctttgccatgtttcagaaacaactctggcgcatcgggcttcccatacaatcgatagattgtcgcacctgattgcccgacattatcgcgagcccatttatacccatataaatcagcatccatgttggaatttaatcgcggcctcgaaacgtgagtcttttccttacccatactagtttttagtttatgtatgtgttttttgtagttatagatttaagcaagaaaagaatacaaacaaaaaattgaaaaagattgatttagaattaaaaagaaaaatatttacgtaagaagggaaaatagtaaatgttgcaagttcactaaactcctaaattatgctgccctttatattccctgttacagcagccgagccaaaggtatataggctcctttgcattagcatgcgtaacaaaccacctgtcagtttcaaccgaggtggtatccgagagaattgtgtgattgctttaattaatttcggagaatctcacatgccactgaagattaaaaactggatgccagaaaaggggtgtccaggtgtaacatcaatagaggaagctgaaaagtcttagaacgggtaatcttccaccaacctgatgggttcctagatataatctcgaagggaataagtagggtgataccgcagaagtgtctgaatgtattaaggtcctcacagtttaaatcccgctcacactaacgtaggattattataactcaaaaaaatggcattattctaagtaagttaaatatccgtaatctttaaacagcggccgcggatcttcatcctgccactgcaattcttttcatatcggtcatatatcctctcagctttttacccacctgttctatagcatgtgaacgaatagcttcatttacgtctctcagttggccattgtcaaccgctccttccggaatagccttccccaaatcaccaggttgtaactcggccatgaagggctttaacaacgggacacatgcgtagctaaataagtaattaccatattctgcagtgtctgatatgacaacattcatctcgtaaagtctttttcttgcaatagtatttgctatcaaaggcaattcatgcaaagactcatagtatgcagattcttcaatgataccggagtcaaccatagtttcgaatgcaagttctacccctgccttcaccatagctatcatcaatactcccttatcaaagtattcttgttcaccaattttaccttcgtattgtggggctgtctcgaatgccgtcttgccggtttcttctctccacgtcaataactttttatcatcgtttgcccaatctgccatcattcctgaggaaaactcaccggagataatatcgtccatgtgcttttggaataatggtgccatgatctcttttagttgctcagataaggcgtaggctcttagcttggccggatttgaaagtctatccatcatcaatgttatgccaccttgtttaagtgcctcggtgattgtctcccaaccaaattgtatcaacttttcagcataggcaggatctgtaccctcttcgaccaatttatcaaagcatagtaaagaccctgcctgcaacattccgcacagaatggtttgttcacccattaagtcactcttgacctcagctacgaaagaactctctaacacacccgctctatgacctccggttgcggctgcccatgccttcgcaattgccataccttcacgtttggggtcattttcaggatgtacggcgatcaatgtaggtacaccaaaacccctcttgtactcctctctgacttccgtacctgggcactttggcgcaaccattacgactgttataccttttctgatctgctcgcccacttcaacgatattaaagccatgagagtaacctaaagctgccccatccttcatcagcggttgaactgttcttactacgtctgagtgaaccttatctggtgttaggttaatcactaaatctgcctgagggatcagttcttcgtaagtaccaactttgaacccattttccgtcgctttacgccaatcggcatccttttctgcaatagactctttcctcaatgcatacgaaatatccagacctgaatctctcatgtttaaaccttggtttagaccctgagcaccgcagccaacaattactactttctttccttgcagataagaagcaccatcagcaaactcgtcccttcccataaatctgcacttacccagttgagccaattgttgtctcaaatttaatgtgttaaaatagttggccatgtcgagtcgaaactaagttctggtgttttaaaactaaaaaaaagactaactataaaagtagaatttaagaagtttaagaaatagatttacagaattacaatcaatacctaccgtctttatatacttattagtcaagtaggggaataatttcagggaactggtttcaaccttttttttcagctttttccaaatcagagagagcagaaggtaatagaaggtgtaagaaaatgagatagatacatgcgtgggtcaattgccttgtgtcatcatttactccaggcaggttgcatcactccattgaggttgtgcccgttttttgcctgtttgtgcccctgttctctgtagttgcgctaagagaatggacctatgaactgatggttggtgaagaaaacaatattttggtgctgggattctttttttttctggatgccagcttaaaaagcgggctccattatatttagtggatgccaggaataaactgttcacccagacacctacgatgttatatattctgtgtaacccgccccctattttgggcatgtacgggttacagcagaattaaaaggctaattttttgactaaataaagttaggaaaatcactactattaattatttacgtattctttgaaatggcgagtattgataatgataaactggatccgcggccgcttacagatcagtaacacacccttccgatgcaggacgggttaatttagcgaattttgccaaaactcccctggtggctttcggagttggcttctgataattagctcttctctttgcgatttcttcatcggaaactttcagggatatagagttgttgactgcatctatctctattatatcgtcatcttcaactaagccgattagtccaccctcaacggcttcaggcacaatatggccgacaacaaaaccgtgagtgccaccggagaatctaccatccgtaattaacgcgcaacttttccctaaacccgcaccaattaatgctgatgtaggcttcagcatttcgggcataccaggtccgccgacgggacctatattcctaattaccgctacatctccagcatgcaaacgaccagattctatgccgtcgataaaatgttgttcaccatcaaagactctggcagtgcctttgaagaactctccttctttaccgctaatttttgctacggaacccccttgagctaaattaccgtacagaatctgcaagtggccggtggccttgataggattctttagtggcctcatgatatcttgtgagtcgaaatccaagtctagggcagtctcgacattctcggctaatgttttacccgtcacagtaaggcagtcaccatgcaattttccttcctttagaaggtacttaagcactgctggcaagcctccaattttatgcaaatcttccatcatatatttacctgaaggtttaaaatcacctagtactggagtaatgtcactaattctttggaagtcatcctgagttatttcgacacctatcgcgttagccattgcaataatatgcaagacagcattagtactaccccccaagaccatcacaatggtaatagcgttctcgaacgcctccttagtcattatatcactaggcttgatgtctttttccaaaagattcttaatggctaatccaatctcatcacattcttcttgtttttcttgagatactgcagggttcgaagaagaatacggcaatgacatacctagtgtttcgatagcggcagctaaggtattagctgtgtacatccccccacatgccccttgaccaggaatagcattacaaataacaccgtgataatcttcatcagagatattgccggtaattttctggcctagagattcaaaagccgatacgatgttcaatttctcacctttatattcaccgtgttctattgttcctccatacaccataatgcttggcctattaagtcttgccataccaataatagaacctggcatatttttgtcacaacctgggatggctacaattgcatcatagtattcagcgccagcgttggtttcaatagagtcagctataacttctctggaaacaagggagtatctcattcccaactttccatttgctatcccatcagaaactcctatcgtatgaaattgtaagccgatcagaccatctgtctgatttactgagcttttaatctttgatccaagggttcctaaatgcatgttgcatggatttccatcccagtccatcgacactatacccacttgagctttcttgaaatcttcgtctttaaacccgatgccgtaatacattgcctgtgtggcgggttgtgtgggatcttgtgtcaacgttttgctgtacttattcagttcaacagattcaactttgccgttatacttaaactccatgtcgacaaacttagattagattgctatgctttctttctaatgagcaagaagtaaaaaaagttgtaatagaacaagaaaaatgaaactgaaacttgagaaattgaagaccgtttattaacttaaatatcaatgggaggtcatcgaaagagaaaaaaatcaaaaaaaaaattttcaagaaaaagaaacgtgataaaaatttttattgcctttttcgacgaagaaaaagaaacgaggcggtctcttttttcttttccaaacctttagtacgggtaattaacgacaccctagaggaagaaagaggggaaatttagtatgctgtgcttgggtgttttgaagtggtacggcgatgcgcggagtccgagaaaatctggaagagtaaaaaaggagtagaaacattttgaagctatgagctccagcttttgttccctttagtgagggttaattgcgcgcttggcgtaatcatggtcatagctgtttcctgtgtgaaattgttatccgctcacaattccacacaacataggagccggaagcataaagtgtaaagcctggggtgcctaatgagtgaggtaactcacattaattgcgttgcgctcactgcccgctttccagtcgggaaacctgtcgtgccagctgcattaatgaatcggccaacgcgcggggagaggcggtttgcgtattgggcgctcttccgcttcctcgctcactgactcgctgcgctcggtcgttcggctgcggcgagcggtatcagctcactcaaaggcggtaatacggttatccacagaatcaggggataacgcaggaaagaacatgtgagcaaaaggccagcaaaaggccaggaaccgtaaaaaggccgcgttgctggcgtttttccataggctccgcccccctgacgagcatcacaaaaatcgacgctcaagtcagaggtggcgaaacccgacaggactataaagataccaggcgtttccccctggaagctccctcgtgcgctctcctgttccgaccctgccgcttaccggatacctgtccgcctttctcccttcgggaagcgtggcgctttctcatagctcacgctgtaggtatctcagttcggtgtaggtcgttcgctccaagctgggctgtgtgcacgaaccccccgttcagcccgaccgctgcgccttatccggtaactatcgtcttgagtccaacccggtaagacacgacttatcgccactggcagcagccactggtaacaggattagcagagcgaggtatgtaggcggtgctacagagttcttgaagtggtggcctaactacggctacactagaaggacagtatttggtatctgcgctctgctgaagccagttaccttcggaaaaagagttggtagctcttgatccggcaaacaaaccaccgctggtagcggtggtttttttgtttgcaagcagcagattacgcgcagaaaaaaaggatctcaagaagatcctttgatcttttctacggggtctgacgctcagtggaacgaaaactcacgttaagggattttggtcatgagattatcaaaaaggatcttcacctagatccttttaaattaaaaatgaagttttaaatcaatctaaagtatatatgagtaaacttggtctgacagttaccaatgcttaatcagtgaggcacctatctcagcgatctgtctatttcgttcatccatagttgcctgactccccgtcgtgtagataactacgatacgggagggcttaccatctggccccagtgctgcaatgataccgcgagacccacgctcaccggctccagatttatcagcaataaaccagccagccggaagggccgagcgcagaagtggtcctgcaactttatccgcctccatccagtctattaattgttgccgggaagctagagtaagtagttcgccagttaatagtttgcgcaacgttgttgccattgctacaggcatcgtggtgtcacgctcgtcgtttggtatggcttcattcagctccggttcccaacgatcaaggcgagttacatgatcccccatgttgtgcaaaaaagcggttagctccttcggtcctccgatcgttgtcagaagtaagttggccgcagtgttatcactcatggttatggcagcactgcataattctcttactgtcatgccatccgtaagatgcttttctgtgactggtgagtactcaaccaagtcattctgagaatagtgtatgcggcgaccgagttgctcttgcccggcgtcaatacgggataataccgcgccacatagcagaactttaaaagtgctcatcattggaaaacgttcttcggggcgaaaactctcaaggatcttaccgctgttgagatccagttcgatgtaacccactcgtgcacccaactgatcttcagcatcttttactttcaccagcgtttctgggtgagcaaaaacaggaaggcaaaatgccgcaaaaaagggaataagggcgacacggaaatgttgaatactcatactcttcctttttcaatattattgaagcatttatcagggttattgtctcatgagcggatacatatttgaatgtatttagaaaaataaacaaataggggttccgcgcacatttccccgaaaagtgccacctgaacgaagcatctgtgcttcattttgtagaacaaaaatgcaacgcgagagcgctaatttttcaaacaaagaatctgagctgcatttttacagaacagaaatgcaacgcgaaagcgctattttaccaacgaagaatctgtgcttcatttttgtaaaacaaaaatgcaacgcgagagcgctaatttttcaaacaaagaatctgagctgcatttttacagaacagaaatgcaacgcgagagcgctattttaccaacaaagaatctatacttcttttttgttctacaaaaatgcatcccgagagcgctatttttctaacaaagcatcttagattactttttttctcctttgtgcgctctataatgcagtctcttgataactttttgcactgtaggtccgttaaggttagaagaaggctactttggtgtctattttctcttccataaaaaaagcctgactccacttcccgcgtttactgattactagcgaagctgcgggtgcattttttcaagataaaggcatccccgattatattctataccgatgtggattgcgcatactttgtgaacagaaagtgatagcgttgatgattcttcattggtcagaaaattatgaacggtttcttctattttgtctctatatactacgtataggaaatgtttacattttcgtattgttttcgattcactctatgaatagttcttactacaatttttttgtctaaagagtaatactagagataaacataaaaaatgtagaggtcgagtttagatgcaagttcaaggagcgaaaggtggatgggtaggttatatagggatatagcacagagatatatagcaaagagatacttttgagcaatgtttgtggaagcggtattcgcaatattttagtagctcgttacagtccggtgcgtttttggttttttgaaagtgcgtcttcagagcgcttttggttttcaaaagcgctctgaagttcctatactttctagagaataggaacttcggaataggaacttcaaagcgtttccgaaaacgagcgcttccgaaaatgcaacgcgagctgcgcacatacagctcactgttcacgtcgcacctatatctgcgtgttgcctgtatatatatatacatgagaagaacggcatagtgcgtgtttatgcttaaatgcgtacttatatgcgtctatttatgtaggatgaaaggtagtctagtacctcctgtgatattatcccattccatgcggggtatcgtatgcttccttcagcactaccctttagctgttctatatgctgccactcctcaattggattagtctcatccttcaatgctatcatttcctttgata

SEQ ID NO: 126-200 - skipped (75 entries)

SEQ ID NO: 201 - DNA, 46 bp, UNKNOWN
  Primer XX1
cgcaccggttttctcctctttaatgaattcggtcagtgcgtcctgc

SEQ ID NO: 202 - DNA, 36 bp, UNKNOWN
  Primer XX2
gcggccgccctagggcgttcggctgcggcgagcggt

SEQ ID NO: 203 - DNA, 56 bp, UNKNOWN
  Primer XX3
cgcgaattcggatccgaggagaaaatagttatgaacaactttaatctgcacacccc

SEQ ID NO: 204 - DNA, 42 bp, UNKNOWN
  Primer XX4
gcgcctagggcggccgcttagcgggcggcttcgtatatacgg

SEQ ID NO: 205 - DNA, 61 bp, UNKNOWN
  Primer 50
gcagtttcaccttctacataatcacgaccgtagtaggtatcattccggggatccgtcgacc

SEQ ID NO: 206 - DNA, 60 bp, UNKNOWN
  Primer 73
ctggcttaagtaccgggttagttaacttaaggagaatgacgtgtaggctggagctgcttc

SEQ ID NO: 207 - DNA, 60 bp, UNKNOWN
  Primer 74
ctcaaactcattccaggaacgaccatcacgggtaatcatcattccggggatccgtcgacc

SEQ ID NO: 208 - DNA, 65 bp, UNKNOWN
  Primer 116
cagcgttcgctttatatcccttacgctggccctgtactgctggaagtgtaggctggagctgcttc

SEQ ID NO: 209 - DNA, 65 bp, UNKNOWN
  Primer 117
ttcggcttgccagaaattatcgtcaatggcctgttgcagggcttcattccggggatccgtcgacc

SEQ ID NO: 210 - DNA, 26 bp, UNKNOWN
  Primer 350
cttaaattctacttttatagttagtc

SEQ ID NO: 211 - DNA, 65 bp, UNKNOWN
  Primer 474
caaagctgcggatgatgacgagattactgctgctgtgcagactgaattccggggatccgtcgacc

SEQ ID NO: 212 - DNA, 20 bp, UNKNOWN
  Primer 772
aggaaggagcacagacttag

SEQ ID NO: 213 - DNA, 64 bp, UNKNOWN
  Primer 868
cacaacatcacgaggaatcaccatggctaactacttcaatacacgtgtaggctggagctgcttc

SEQ ID NO: 214 - DNA, 65 bp, UNKNOWN
  Primer 869
cttaacccgcaacagcaatacgtttcatatctgtcatatagccgcattccggggatccgtcgacc

SEQ ID NO: 215 - DNA, 45 bp, UNKNOWN
  Primer 1030
gtcggtgaacgctctcctgagtagggtgtaggctggagctgcttc

SEQ ID NO: 216 - DNA, 45 bp, UNKNOWN
  Primer 1031
gaagcagctccagcctacaccctactcaggagagcgttcaccgac

SEQ ID NO: 217 - DNA, 69 bp, UNKNOWN
  Primer 1032
cacaacatcacgaggaatcaccatggctaactacttcaatacaccacgaggccctttcgtcttcacctc

SEQ ID NO: 218 - DNA, 65 bp, UNKNOWN
  Primer 1155
cccaacccgcattctgtttggtaaaggcgcaatcgctggtttacggtgtaggctggagctgcttc

SEQ ID NO: 219 - DNA, 65 bp, UNKNOWN
  Primer 1156
caatcgcggcgtcaatacgctcatcatcggaaccttcagtgatgtattccggggatccgtcgacc

SEQ ID NO: 220 - DNA, 65 bp, UNKNOWN
  Primer 1187
cggataaagttcgtgagattgccgcaaaactggggcgtcatgtgggtgtaggctggagctgcttc

SEQ ID NO: 221 - DNA, 65 bp, UNKNOWN
  Primer 1188
cagacatcaagtaacctttatcgcgcagcagattaaccgcttcgcattccggggatccgtcgacc

SEQ ID NO: 222 - DNA, 65 bp, UNKNOWN
  Primer 1191
ggcactcacgttgggctgagacacaagcacacattcctctgcacggtgtaggctggagctgcttc

SEQ ID NO: 223 - DNA, 65 bp, UNKNOWN
  Primer 1192
gcaccagaaaccataactacaacgtcacctttgtgtgccagaccgattccggggatccgtcgacc

SEQ ID NO: 224 - DNA, 67 bp, UNKNOWN
  Primer 1205
gttatctagttgtgcaaaacatgctaatgtagccaccaaatccacgaggccctttcgtcttcacctc

SEQ ID NO: 225 - DNA, 42 bp, UNKNOWN
  Primer 1218
gctcactcaaaggcggtaatacgtgtaggctggagctgcttc

SEQ ID NO: 226 - DNA, 42 bp, UNKNOWN
  Primer 1219
gaagcagctccagcctacacgtattaccgcctttgagtgagc

SEQ ID NO: 227 - DNA, 20 bp, UNKNOWN
  Primer 1220
cgtagaatcaccagaccagc

SEQ ID NO: 228 - DNA, 56 bp, UNKNOWN
  Primer 1296
ttttgtcgacggatccaggagacaacattatgtctattccagaaactcaaaaagcg

SEQ ID NO: 229 - DNA, 46 bp, UNKNOWN
  Primer 1297
ttttgtcgacgcggccgcttatttagaggtgtccaccacgtaacgg

SEQ ID NO: 230 - DNA, 20 bp, UNKNOWN
  Primer 1321
aatcatatcgaacacgatgc

SEQ ID NO: 231 - DNA, 20 bp, UNKNOWN
  Primer 1322
tcagaaaggatcttctgctc

SEQ ID NO: 232 - DNA, 20 bp, UNKNOWN
  Primer 1323
atcgatatcgtgaaatacgc

SEQ ID NO: 233 - DNA, 20 bp, UNKNOWN
  Primer 1324
agctggtctggtgattctac

SEQ ID NO: 234 - DNA, 20 bp, UNKNOWN
  Primer 1341
tgctgaaagagaaattgtcc

SEQ ID NO: 235 - DNA, 20 bp, UNKNOWN
  Primer 1342
tttcttgttcgaagtccaag

SEQ ID NO: 236 - DNA, 37 bp, UNKNOWN
  Primer 1364
ttttgcggccgcttagatgccggagtcccagtgcttg

SEQ ID NO: 237 - DNA, 22 bp, UNKNOWN
  Primer 1365
agttgttgacgcaggttcagag

SEQ ID NO: 238 - DNA, 20 bp, UNKNOWN
  Primer 238
aaatgacgacgagcctgaag

SEQ ID NO: 239 - DNA, 20 bp, UNKNOWN
  Primer 1437
gacctgaccatttgatggag

SEQ ID NO: 240 - DNA, 21 bp, UNKNOWN
  Primer 1439
caattggcgaagcagaacaag

SEQ ID NO: 241 - DNA, 47 bp, UNKNOWN
  Primer 1469
ttttagatctaggagataccggtatgtcgtttactttgaccaacaag

SEQ ID NO: 242 - DNA, 21 bp, UNKNOWN
  Primer 1440
atcgtacatcttccaagcatc

SEQ ID NO: 243 - DNA, 20 bp, UNKNOWN
  Primer 1441
aatcggaaccctaaagggag

SEQ ID NO: 244 - DNA, 20 bp, UNKNOWN
  Primer 1442
aatgggcaagctgtttgctg

SEQ ID NO: 245 - DNA, 20 bp, UNKNOWN
  Primer 1443
tgcagatgcagatgtgagac

SEQ ID NO: 246 - DNA, 51 bp, UNKNOWN
  Primer 1470
ttttggatccaggaaatagatctatgatggctaacagaatgattctgaacg

SEQ ID NO: 247 - DNA, 36 bp, UNKNOWN
  Primer 1471
ttttgcggccgcttaccaggcggtatggtaaagctc

SEQ ID NO: 248 - DNA, 64 bp, UNKNOWN
  Primer 1479
ccgataggcttccgccatcgtcgggtagttaaaggtggtgttgagtgtaggctggagctgcttc

SEQ ID NO: 249 - DNA, 70 bp, UNKNOWN
  Primer 1485
gcctttattgtacgctttttactgtacgatttcagtcaaatctaacacgaggccctttcgtcttcacctc

SEQ ID NO: 250 - DNA, 65 bp, UNKNOWN
  Primer 1486
aagtacgcagtaaataaaaaatccacttaagaaggtaggtgttacattccggggatccgtcgacc

SEQ ID NO: 251 - DNA, 39 bp, UNKNOWN
  Primer 1526
tcgacgaggagacaacattgtgtaggctggagctgcttc

SEQ ID NO: 252 - DNA, 39 bp, UNKNOWN
  Primer 1527
gaagcagctccagcctacacaatgttgtctcctcgtcga

SEQ ID NO: 253 - DNA, 65 bp, UNKNOWN
  Primer 1539
ccattctgttgcttttatgtataagaacaggtaagccctaccatggagaattgtgagcggataac

SEQ ID NO: 254 - DNA, 42 bp, UNKNOWN
  Primer 1561
gcaatcctgaaagctctgtaacattccggggatccgtcgacc

SEQ ID NO: 255 - DNA, 42 bp, UNKNOWN
  Primer 1562
ggtcgacggatccccggaatgttacagagctttcaggattgc

SEQ ID NO: 256 - DNA, 70 bp, UNKNOWN
  Primer 1563
caaatcggcggtaacgaaagaggataaaccgtgtcccgtattattcacgaggccctttcgtcttcacctc

SEQ ID NO: 257 - DNA, 22 bp, UNKNOWN
  Primer 1566
tcccacccaatcaaggccaacg

SEQ ID NO: 258 - DNA, 22 bp, UNKNOWN
  Primer 1567
tccacctggtgccaatgaaccg

SEQ ID NO: 259 - DNA, 24 bp, UNKNOWN
  Primer 1587
cggctgccagaactctactaactg

SEQ ID NO: 260 - DNA, 23 bp, UNKNOWN
  Primer 1588
gcgacgtctactggcaggttaat

SEQ ID NO: 261 - DNA, 21 bp, UNKNOWN
  Primer 1595
caacctggtgatttggggaag

SEQ ID NO: 262 - DNA, 20 bp, UNKNOWN
  Primer 1597
gaatgatggcagattgggca

SEQ ID NO: 263 - DNA, 22 bp, UNKNOWN
  Primer 1598
tattgtggggctgtctcgaatg

SEQ ID NO: 264 - DNA, 19 bp, UNKNOWN
  Primer 1624
ccctcatgttgtctaacgg

SEQ ID NO: 265 - DNA, 24 bp, UNKNOWN
  Primer 1633
tccgtcactggattcaatgccatc

SEQ ID NO: 266 - DNA, 20 bp, UNKNOWN
  Primer 1634
ttcgccagggagctggtgaa

SEQ ID NO: 267 - DNA, 21 bp, UNKNOWN
  Primer 1798
gcaaattaaagccttcgagcg

SEQ ID NO: 268 - DNA, 39 bp, UNKNOWN
  Primer 1926
tttttgtcgacggatccagtttatcattatcaatactcg

SEQ ID NO: 269 - DNA, 45 bp, UNKNOWN
  Primer 1927
ttttgcggccgcagatctctcgagtcgaaactaagttctggtgtt

SEQ ID NO: 270 - DNA, 22 bp, UNKNOWN
  Primer 2091
cttttcttcccttgtctcaatc

SEQ ID NO: 271 - DNA, 39 bp, UNKNOWN
  Primer 2352
gactcgacctaggttatttagtaaaatcaatgaccattc

SEQ ID NO: 272 - DNA, 38 bp, UNKNOWN
  Primer 2353
ctaaataacctaggtcgagtcatgtaattagttatgtc

SEQ ID NO: 273 - DNA, 30 bp, UNKNOWN
  Primer KARIpETfor
attcatatggcgaattatttcaacactctg

SEQ ID NO: 274 - DNA, 28 bp, UNKNOWN
  Primer KARIpETrev
taatctcgaggccagccaccgcgatgcg

SEQ ID NO: 275 - DNA, 16 bp, UNKNOWN
  Primer pETup
atgcgtccggcgtaga

SEQ ID NO: 276 - DNA, 35 bp, UNKNOWN
  Primer seq_ilvC_pGV
gcggccgcgtcgacgaggagacaacattatggcga

SEQ ID NO: 277 - DNA, 51 bp, UNKNOWN
  Primer pGV1994ep_for
cggtcttcaatttctcaagtttcagtttcatttttcttgttctattacaac

SEQ ID NO: 278 - DNA, 35 bp, UNKNOWN
  Primer pGV1994ep_rev
ctaactccttccttttcggttagagcggatgtggg

SEQ ID NO: 279 - DNA, 47 bp, UNKNOWN
  Primer Not_in_for
cctctagaaataatttgcggccgcgttaagaaggagatatacatatg

SEQ ID NO: 280 - DNA, 41 bp, UNKNOWN
  Primer AvrII_in_rev
ccgaacgccctaggtcagtggtggtggtggtggtgctcgag

SEQ ID NO: 281 - DNA, 28 bp, UNKNOWN
  Primer R68DK69Lfor
tagctatgcgctggacctggaggctatc

SEQ ID NO: 282 - DNA, 28 bp, UNKNOWN
  Primer R68DK69Lrev
gatagcctccaggtccagcgcatagcta

SEQ ID NO: 283 - DNA, 28 bp, UNKNOWN
  Primer K75VR76Dfor
aggctatcgcggaagttgacgctagctg

SEQ ID NO: 284 - DNA, 28 bp, UNKNOWN
  Primer K75VR76Drev
cagctagcgtcaacttccgcgatagcct

SEQ ID NO: 285 - DNA, 28 bp, UNKNOWN
  Primer R69NNKfor
  misc_feature (17)..(18): n is a, c, g, or t
tagctatgcgctgcgcnnkgaggctatc

SEQ ID NO: 286 - DNA, 28 bp, UNKNOWN
  Primer R69NNKrev
  misc_feature (11)..(12): n is a, c, g, or t
gatagcctcmnngcgcagcgcatagcta

SEQ ID NO: 287 - DNA, 28 bp, UNKNOWN
  Primer K75NNKfor
  misc_feature (15)..(16): n is a, c, g, or t
aggctatcgcggaannkcgtgctagctg

SEQ ID NO: 288 - DNA, 28 bp, UNKNOWN
  Primer K75NNKrev
  misc_feature (13)..(14): n is a, c, g, or t
cagctagcacgmnnttccgcgatagcct

SEQ ID NO: 289 - DNA, 30 bp, UNKNOWN
  Primer R76NNKfor
  misc_feature (18)..(19): n is a, c, g, or t
aggctatcgcggaaaaannkgctagctggc

SEQ ID NO: 290 - DNA, 30 bp, UNKNOWN
  Primer R76NNKrev
  misc_feature (12)..(13): n is a, c, g, or t
gccagctagcmnntttttccgcgatagcct

SEQ ID NO: 291 - DNA, 28 bp, UNKNOWN
  Primer R68NNK_for
  misc_feature (14)..(15): n is a, c, g, or t
tagctatgcgctgnnkaaggaggctatc

SEQ ID NO: 292 - DNA, 28 bp, UNKNOWN
  Primer R68NNK_rev
  misc_feature (14)..(15): n is a, c, g, or t
gatagcctccttmnncagcgcatagcta

SEQ ID NO: 293 - DNA, 33 bp, UNKNOWN
  Primer S78NNK_for
  misc_feature (16)..(17): n is a, c, g, or t
gcggaaaaacgtgctnnktggcgcaaggctact

SEQ ID NO: 294 - DNA, 33 bp, UNKNOWN
  Primer S78NNK_rev
  misc_feature (17)..(18): n is a, c, g, or t
agtagccttgcgccamnnagcacgtttttccgc

SEQ ID NO: 295 - DNA, 31 bp, UNKNOWN
  Primer A71NNK_for
  misc_feature (16)..(17): n is a, c, g, or t
gcgctgcgcaaggagnnkatcgcggaaaaac

SEQ ID NO: 296 - DNA, 31 bp, UNKNOWN
  Primer A71NNK_rev
  misc_feature (15)..(16): n is a, c, g, or t
gtttttccgcgatmnnctccttgcgcagcgc

SEQ ID NO: 297 - DNA, 31 bp, UNKNOWN
  Primer Gln110NNK_for
  misc_feature (16)..(17): n is a, c, g, or t
ctgaccccagataaannkcatagcgacgttg

SEQ ID NO: 298 - DNA, 31 bp, UNKNOWN
  Primer Gln110NNK_rev
  misc_feature (15)..(16): n is a, c, g, or t
caacgtcgctatgmnntttatctggggtcag

SEQ ID NO: 299 - DNA, 35 bp, UNKNOWN; identical to SEQ ID NO: 276
  Primer seq_ilvC_pGV

SEQ ID NO: 300 - DNA, 31 bp, UNKNOWN
  Primer Q110Qfor
gaccccagataaacaacatagcgacgttgtt

SEQ ID NO: 301 - DNA, 31 bp, UNKNOWN
  Primer Q110Qrev
aacaacgtcgctatgttgtttatctggggtc

SEQ ID NO: 302 - DNA, 31 bp, UNKNOWN
  Primer Q110Afor
gaccccagataaagcacatagcgacgttgtt

SEQ ID NO: 303 - DNA, 31 bp, UNKNOWN
  Primer Q110Arev
aacaacgtcgctatgtgctttatctggggtc

SEQ ID NO: 304 - DNA, 31 bp, UNKNOWN
  Primer Q110Vfor
gaccccagataaagtacatagcgacgttgtt

SEQ ID NO: 305 - DNA, 31 bp, UNKNOWN
  Primer Q110Vrev
aacaacgtcgctatgtactttatctggggtc

SEQ ID NO: 306 - DNA, 30 bp, UNKNOWN
  Primer R68A71recombfor
gctatgcgctgckaaaggagdcaatcgcgg

SEQ ID NO: 307 - DNA, 30 bp, UNKNOWN
  Primer R68A71recombrev
ccgcgattghctcctttmgcagcgcatagc

SEQ ID NO: 308 - DNA, 30 bp, UNKNOWN
  Primer R76S78recombfor
gaaaaacgtgctagctggcgcaaggctact

SEQ ID NO: 309 - DNA, 30 bp, UNKNOWN
  Primer R76S78recombrev
agtagccttgcgccagctagcacgtttttc

SEQ ID NO: 310 - DNA, 30 bp, UNKNOWN
  Primer G76S78recombfor
gaaaaaggtgctagctggcgcaaggctact

SEQ ID NO: 311 - DNA, 30 bp, UNKNOWN
  Primer G76S78recombrev
agtagccttgcgccagctagcacctttttc

SEQ ID NO: 312 - DNA, 30 bp, UNKNOWN
  Primer S76S78recombfor
gaaaaaagtgctagctggcgcaaggctact

SEQ ID NO: 313 - DNA, 30 bp, UNKNOWN
  Primer S76S78recombrev
agtagccttgcgccagctagcacttttttc

SEQ ID NO: 314 - DNA, 30 bp, UNKNOWN
  Primer T76S78recombfor
gaaaaaactgctagctggcgcaaggctact

SEQ ID NO: 315 - DNA, 30 bp, UNKNOWN
  Primer T76S78recombrev
agtagccttgcgccagctagcagttttttc

SEQ ID NO: 316 - DNA, 30 bp, UNKNOWN
  Primer D76S78recombfor
gaaaaagatgctagctggcgcaaggctact

SEQ ID NO: 317 - DNA, 30 bp, UNKNOWN
  Primer D76S78recombrev
agtagccttgcgccagctagcatctttttc

SEQ ID NO: 318 - DNA, 30 bp, UNKNOWN
  Primer R76D78recombfor
gaaaaacgtgctgactggcgcaaggctact

SEQ ID NO: 319 - DNA, 30 bp, UNKNOWN
  Primer R76D78recombrev
agtagccttgcgccagtcagcacgtttttc

SEQ ID NO: 320 - DNA, 30 bp, UNKNOWN
  Primer G76D78recombfor
gaaaaaggtgctgactggcgcaaggctact

SEQ ID NO: 321 - DNA, 30 bp, UNKNOWN
  Primer G76D78recombrev
agtagccttgcgccagtcagcacctttttc

SEQ ID NO: 322 - DNA, 30 bp, UNKNOWN
  Primer S76D78recombfor
gaaaaaagtgctgactggcgcaaggctact

SEQ ID NO: 323 - DNA, 30 bp, UNKNOWN
  Primer S76D78recombrev
agtagccttgcgccagtcagcacttttttc

SEQ ID NO: 324 - DNA, 30 bp, UNKNOWN
  Primer T76D78recombfor
gaaaaaactgctgactggcgcaaggctact

SEQ ID NO: 325 - DNA, 30 bp, UNKNOWN
  Primer T76D78recombrev
agtagccttgcgccagtcagcagttttttc

SEQ ID NO: 326 - DNA, 30 bp, UNKNOWN
  Primer D76D78recombfor
gaaaaagatgctgactggcgcaaggctact

SEQ ID NO: 327 - DNA, 30 bp, UNKNOWN
  Primer D76D78recombrev
agtagccttgcgccagtcagcatctttttc

SEQ ID NO: 328 - DNA, 56 bp, UNKNOWN
  Primer 1994hisrev
tgactcgagcggccgcggatccttagtggtggtggtggtggtgtcctgccactgca

SEQ ID NO: 329 - DNA, 51 bp, UNKNOWN; identical to SEQ ID NO: 277
  Primer pGV1994ep_for

SEQ ID NO: 330 - DNA, 35 bp, UNKNOWN; identical to SEQ ID NO: 278
  Primer pGV1994ep_rev

SEQ ID NO: 331 - protein, 563 aa, Escherichia coli
MRCGQNGGFPPDAGRFSDRVNPMAQPSMLTLQKLQCDVVNISISAINFLSYSEFNLANANRTIRSTTSRGITMANYFNTLNLRQQLAQLGKCRFMGRDEFADGASYLQGKKVVIVGCGAQGLNQGLNMRDSGLDISYALRKEAIAEKRASWRKATENGFKVGTYEELIPQADLVVNLTPDKQHSDVVRTVQPLMKDGAALGYSHGFNIVEVGEQIRKDITVVMVAPKCPGTEVREEYKRGFGVPTLIAVHPENDPKGEGMAIAKAWAAATGGHRAGVLESSFVAEVKSDLMGEQTILCGMLQAGSLLCFDKLVEEGTDPAYAEKLIQFGWETITEALKQGGITLMMDRLSNPAKLRAYALSEQLKEIMAPLFQKHMDDIISGEFSSGMMADWANDDKKLLTWREETGKTAFETAPQYEGKIGEQEYFDKGVLMIAMVKAGVELAFETMVDSGIIEESAYYESLHELPLIANTIARKRLYEMNVVISDTAEYGNYLFSYACVPLLKPFMVELQPGDLGKAIPEGAVDNAQLRDVNEAIRSHAIEQVGKKLRGYMTDMKRIAVAG

SEQ ID NO: 332 - protein, 552 aa, Aureococcus anophagefferens
MTSALLVALAATATAFAPTATPASRFGARTVKAATLASAERLNYYNSLSQAEKLDQLARCRFMDRSEFDDGIEAIAGKKCVVVGCGAQGLNQGLNMRDSGCDVSYALRAESIAEKRASFVNAQSNGFEVGTYEDLIPSADIVLNLTPDKQHTQVVSAIMPLMKQGATLCYSHGFNIVEEGMQVRDDLTVIMVAPKCPGTEVREEYKRGFGVPTLIAVHPPNDPQGLGMAQAKAYAVATGGDRAGVLESSFCAEVKSDLMGEQTILCGMLQTGAVLNFEKMVEKGVDPGYASKLIQYGWETITEALKHGGITGMMDRLDNPSKVKAYELADELKEIMRPLYQKHQNDIITGAFSSGMMADWDNGDANLLKWRAETAETGFEKTPAGPMEIPEQEYFDNAVLMVAEVKAGVELAFEAMTAVGIKAESAYYESLHETPLIANTIARKKLFEMNSVISDTAEYGCYLYDQACKPLLKDFYAKIDTDVIGTKFNTGSNQVDNQQLNAINAAIRNHPVEVIGRELRGYMSDMEAIASDDASVAARAAGLEWTGGSNQD

SEQ ID NO: 333 - protein, 541 aa, Escherichia coli
MAQPSMLTLQKLQCDVVNISISAIIFLSYSEFNLANANRTIRSTTSRGITMANYFNTLNLRQQLAQLGKCRFMGRDEFADGASYLQGKKVVIVGCGAQGLNQGLNMRDSGLDISYALRKEAIAEKRASWRKATENGFKVGTYEELIPQADLVVNLTPDKQHSDVVRTVQPLMKDGAALGYSHGFNIVEVGEQIRKDITVVMVAPKCPGTEVREEYKRGFGVPTLIAVHPENDPKGEGMAIAKAWAAATGGHRAGVLESSFVAEVKSDLMGEQTILCGMLQAGSLLCFDKLVEEGTDPAYAEKLIQFGWETITEALKQGGITLMMDRLSNPAKLRAYALSEQLKEIMAPLFQKHMDDIISGEFSSGMMADWANDDKKLLTWREETGKTAFETAPQYEGKIGEQEYFDKGVLMIAMVKAGVELAFETMVDSGIIEESAYYESLHELPLIANTIARKRLYEMNVVISDTAEYGNYLFSYACVPLLKPFMAELQPGDLGKAIPEGAVDNAQLRDVNEAIRSHAIEQVGKKLRGYMTDMKRIAVAG

SEQ ID NO: 334 - protein, 541 aa, Escherichia coli
MAQPLMLTLQKLQCDVVNISISAINFLSYSEFNLANANRTIRSTTSRGITMANYFNTLNLRQQLAQLGKCRFMGRDEFADGASYLQGKKVVIVGCGAQGLNQGLNMRDSGLDISYALRKEAIAEKRASWRKATENGFKVGTYEELIPQADLVVNLTPDKQHSDVVRSVQPLMKDGAALGYSHGFNIVEVGEQIRKDITVVMVAPKCPGTEVREEYKRGFGVPTLIAVHPENDPKGEGMAIAKAWAAATGGHRAGVLESSFVAEVKSDLMGEQTILCGMLQAGSLLCFDKLVEEGTDPAYAEKLIQFGWETITEALKQGGITLMMDRLSNPAKLRAYALSEQLKEIMAPLFQKHMDDIISGEFSSGMMADWANDDKKLLTWREETGKTAFETAPQYEGKIGEQEYFDKGVLMIAMVKAGVELAFETMVDSGIIEESAYYESLHELPLIANTIARKRLYEMNVVISDTAEYGNYLFSYACVPLLKPFMAELQPGDLGKAIPEGAVDNAQLRDVNEAIRSHAIEQVGKKLRGYMTDMKRIAVAG

SEQ ID NO: 335 - protein, 541 aa, Escherichia coli
MAQPLMLTLQKLQCDVVNISISAINFLSYSEFNLANANRTIRSTTSRGITMANYFNTLNLRQQLAQLGKCRFMGRDEFADGASYLQGKKVVIVGCGAQGLNQGLNMRDSGLDISYALRKEAIAEKRASWRKATENGFKVGTYEELIPQADLVVNLTPDKQHSDVVRTVQPLMKDGAALGYSHGFNIVEVGEQIRKDITVVMVAPKCPGTEVREEYKRGFGVPTLIAVHPENDPKGEGMAIAKAWAAATGGHRAGVLESSFVAEVKSDLMGEQTILCGMLQAGSLLCFDKLVEEGTDPAYAEKLIQFGWETITEALKQGGITLMMDRLSNPAKLRAYALSEQLKEIMAPLFQKHMDDIISGEFSSGMMADWANDDKKLLTWREETGKTAFETAPQYEGKIGEQEYFDKGVLMIAMVKAGVELAFETMVDSGIIEESAYYESLHELPLIANTIARKRLYEMNVVISDTAEYGNYLFSYACVPLLKPFMAELQPGDLGKAIPEGAVDNAQLRDVNEAIRSHAIEQVGKKLRGYMTDMKRIAVAG

SEQ ID NO: 336 - protein, 541 aa, Escherichia coli
MAQPSMLTLQKLQCDVVNISISAINFLSYSEFNLANANRTIRSTTSRGITMANYFNTLNLRQQLAQLGKCRFMGRDEFADGASYLQGKKVVIVGCGAQGLNQGLNMRDSGLDISYALRKEAIAEKRASWRKATENGFKVGTYEELIPQADLVVNLTPDKQHSDVVRTVQPLMKDGAALGYSHGFNIVEVGEQIRKDITVVMVAPKCPGTEVREEYKRGFGVPTLIAVHPENDPKGEGMAIAKAWAAATGGHRAGVLESSFVAEVKSDLMGEQTILCGMLQAGSLLCFDKLVEEGTDPAYAEKLIQFGWETITEALKQGGITLMMDRLSNPAKLRAYALSEQLKEIMAPLFQKHMDDIISGEFSSGMMADWANDDKKLLTWREETGKTAFETAPQYEGKIGEQEYFDKGVLMIAMVKAGVELAFETMVDSGIIEESAYYESLHELPLIANTIARKRLYEMNVVISDTAEYGNYLFSYACVPLLKPFMAELQPGDLGKAIPEGAVDNAQLRDVNEAIRSHAIEQVGKKLRGYMTDMKRIAVAG

SEQ ID NO: 337 - protein, 541 aa, Escherichia coli
MAQPSMLTLQKLQCDVVNISISAINFLSYSEFNLANANRTIRSTTSRGITMANYFNTLNLRQQLAQLGKCRFMGRDEFADGASYLQGKKVVIVGCGAQGLNQGLNMRDSGLDISYALRKEAIAEKRASWRKATENGFKVGTYEELIPQADLVVNLTPDKQHSDVVRTVQPLMKDGAALGYSHGFNIVEVGEQIRKDITVVMVAPKCPGTEVREEYKRGFGVPTLIAVHPENDPKGEGMAIAKAWAAATGGHRAGVLESSFVAEVKSDLMGEQTILCGMLQAGSLLCFDKLVEEGTDPAYAEKLIQFGWETITEALKQGGITLMMDRLSNPAKLRAYALSEQLKEIMAPLFQKHMDDIISGEFSSGMMADWANDDKKLLTWREETGKTAFETAPQYEGKIGEQEYFDKGVLMIAMVKAGVELAFETMVDSGIIEESAYYESLHELPLIANTIARKRLYEMNVVISDTAEYGNYLFSYACVPLLKPFMAELQPGDLGKAIPEGAVDNAQLRDVNEAIRCHAIEQVGKKLRGYMTDMKRIAVAG

SEQ ID NO: 338 - protein, 541 aa, Escherichia coli
MAQPSMLTLQKLQCDVVNISISAINFLSYSEFNLANANRTIRSTTSRGITMANYFNTLNLRQQLAQLGKCRFMGRDEFADGASYLQDKKVVIVGCGAQGLNQGLNMRDSGLDISYALRKEAIAEKRASWRKATENGFKVGTYEELIPQADLVVNLTPDKQHSDVVRTVQPLMKDGAALGYSHGFNIVEVGEQIRKDITVVMVAPKCPGTEVREEYKRGFGVPTLIAVHPENDPKGEGMAIAKAWAAATGGHRAGVLESSFVAEVKSDLMGEQTILCGMLQAGSLLCFDKLVEEGTDPAYAEKLIQFGWETITEALKQGGITLMMDRLSNPAKLRAYALSEQLKEIMAPLFQKHMDDIISGEFSSGMMADWANDDKKLLTWREETGKTAFETAPQYEGKIGEQEYFDKGVLMIAMVKAGVELAFETMVDSGIIEESAYYESLHELPLIANTIARKRLYEMNVVISDTAEYGNYLFSYACVPLLKPFMAELQPGDLGKAIPEGAVDNAQLRDVNEAIRSHAIEQVGKKLRGYMTDMKRIAVAG

SEQ ID NO: 339 - protein, 541 aa, Escherichia coli
MAQPLMLTLQKLQYDVVNISISAINFLSYSEFNLANANRTIRSTTSRGITMANYFNTLNLRQQLAQLGKCRFMGRDEFADGASYLQGKKVVIVGCGAQGLNQGLNMRDSGLDISYALRKEAIAEKRASWRKATENGFKVGTYEELIPQADLVVNLTPDKQHSDVVRSVQPLMKDGAALGYSHGFNIVEVGEQIRKDITVVMVAPKCPGTEVREEYKRGFGVPTLIAVHPENDPKGEGMAIAKAWAAATGGHRAGVLESSFVAEVKSDLMGEQTILCGMLQAGSLLCFDKLVEEGTDPAYAEKLIQFGWETITEALKQGGITLMMDRLSNPAKLRAYALSEQLKEIMAPLFQKHMDDIISGEFSSGMMADWANDDKKLLTWREETGKTAFETAPQYEGKIGEQEYFDKGVLMIAMVKAGVELAFETMVDSGIIEESAYYESLHELPLIANTIARKRLYEMNVVISDTAEYGNYLFSYACVPLLKPFMAELQPGDLGKAIPEGAVDNAQLRDVNEAIRSHAIEQVGKKLRGYMTDMKRIAVAG

SEQ ID NO: 340 - protein, 541 aa, Shigella sp.
MAQPSMLTLQKLQCDVVNISISAINFLSYSEFNLANANRTIRSTTSRGITMANYFNTLNLRQQLAQLGKCRFMGRDEFADGASYLQGKKVVIVGCGAQGLNQGLNMRDSGLDISYALRKEAIAEKRASWRKATENGFKVGTYEELIPQADLVVNLTPDKQHSDVVRTVQPLMKDGAALGYSHGFNIVEVGEQIRKDITVVMVAPKCPGTEVREEYKRGFGVPTLIAVHPENDPKGEGMAIAKAWAAATGGHRAGVLESSFVAEVKSDLMGEQTILCGMLQAGSLLCFDKLVEEGTDPAYAEKLIQFGWETITEALKQGGITLMMDRLSNPAKLRAYALSEQLKEIMAPLFQKHMDDIISGEFSSGMMADWTNDDKKLLTWREETGKTAFETAPQYEGKIGEQEYFDKGVLMIAMVKAGVELAFETMVDSGIIEESAYYESLHELPLIANTIARKRLYEMNVVISDTAEYGNYLFSYACVPLLKPFMAELQPGDLGKAIPEGAVDNAQLRDVNEAIRSHAIEQVGKKLRGYMTDMKRIAVAG

SEQ ID NO: 341 - protein, 536 aa, Shigella flexneri
MLTLQKLQCDVVNISISAINFLSYSEFNLANANRTIRSTTSRGITMANYFNTLNLRQQLAQLGKCRFMGRDEFADGASYLQGKKVVIVGCGAQGLNQGLNMRDSGLDISYALRKEAIAEKRASWRKATENGFKVGTYEELIPQADLVVNLTPDKQHSDVVRTVQPLMKDGAALGYSHGFNIVEVGEQIRKDITVVMVAPKCPGTEVREEYKRGFGVPTLIAVHPENDPKGEGMAIAKAWAAATGGHRAGVLESSFVAEVKSDLMGEQTILCGMLQAGSLLCFDKLVEEGTDPAYAEKLIQFGWETITEALKQGGITLMMDRLSNPAKLRAYALSEQLKEIMAPLFQKHMDDIISGEFSSGMMADWANDDKKLLTWREETGKTAFETAPQYEGKIGEQEYFDKGVLMIAMVKAGVELAFETMVDSGIIEESAYYESLHELPLIANTIVRKRLYEMNVVISDTAEYGNYLFSYACVPLLKPFMAELQPGDLGKAIPEGAVDNAQLRDVNEAIRSHAIEQVGKKLRGYMTDMKRIAVAG

SEQ ID NO: 342 - protein, 536 aa, Escherichia coli
MLTLQKLQCDVVNISIFAINFLSYSEFNLANANRTIRSTTSRGITMANYFNTLNLRQQLAQLGKCRFMGRDEFADGASYLQGKKVVIVGCGAQGLNQGLNMRDSGLDISYALRKEAIAEKRASWRKATENGFKVGTYEELIPQADLVINLTPDKQHSDVVRTVQPLMKDGAALGYSHGFNIVEVGEQIRKDITVVMVAPKCPGTEVREEYKRGFGVPTLIAVHPENDPKGEGMAIAKAWAAATGGHRAGVLESSFVAEVKSDLMGEQTILCGMLQAGSLLCFDKLVEEGTDPAYAEKLIQFGWETITEALKQGGITLMMDRLSNPAKLRAYALSEQLKEIMAPLFQKHMDDIISGEFSSGMMADWANDDKKLLTWREETGKTAFETAPQYEGKIGEQEYFDKGVLMIAMVKAGVELAFETMVDSGIIEESAYYESLHELPLIANTIARKRLYEMNVVISDTAEYGNYLFSYACVPLLKPFMAELQPGDLGKAIPEGAVDNGQLRDVNEAIRSHAIEQVGKKLRGYMTDMKRIAVAG

SEQ ID NO: 343 - protein, 536 aa, Shigella flexneri
MLTLQKLQCDVVNISISAINFLSYSEFNLANANRTIRSTTSRGITMANYFNTLNLRQQLAQLGKCRFMGRDEFADGASYLQGKKVVIVGCGAQGLNQGLNMRDSGLDISYALRKEAIAEKRASWRKATENGFKVGTYEELIPQADLVVNLTPDKQHSDVVRTVQPLMKDGAALGYSHGFNIVEVGEQIRKDITVVMVAPKCPGTEVREEYKRGFGVPTLIAVHPENDPKGEGMAIAKAWAAATGGHRAGVLESSFVAEVKSDLMGEQTILCGMLQAGSLLCFDKLVEEGTDPAYAEKLIQFGWETITEALKQGGITLMMDRLSNPAKLRAYALSEQLKEIMAPLFQKHMDDIISGEFSSGMMADWANDDKKLLTWREETGKTAFETAPQYEGKIGEQEYFDKGVLMIAMVKAGVELAFETMVDSGIIEESAYYESLHELPLIANTIARKRLYEMNVVISDTAEYGNYLFSYACVPLLKPFMAELQPGDLGKAIPEGAVDNAQLRDVNEAIRSHAIEQVGKKLRGYMTDMKRIAVAG

SEQ ID NO: 344 - protein, 536 aa, Escherichia sp.
MLTLQKLQCDVVNISISAINFLSYSEFNLANANRTIRSTTSRGITMANYFNTLNLRQQLAQLGKCRFMGRDEFADGASYLQGKKVVIVGCGAQGLNQGLNMRDSGLDISYALRKEAIAEKRASWRKATENGFKVGTYEELIPQADLVINLTPDKQHSDVVRTVQPLMKDGAALGYSHGFNIVEVGEQIRKDITVVMVAPKCPGTEVREEYKRGFGVPTLIAVHPENDPKGEGMAIAKAWAAATGGHRAGVLESSFVAEVKSDLMGEQTILCGMLQAGSLLCFDKLVEEGTDPAYAEKLIQFGWETITEALKQGGITLMMDRLSNPAKLRAYALSEQLKEIMAPLFQKHMDDIISGEFSSGMMADWANDDKKLLTWREETGKTAFETAPQYEGKIGEQEYFDKGVLMIAMVKAGVELAFETMVDSGIIEESAYYESLHELPLIANTIARKRLYEMNVVISDTAEYGNYLFSYACVPLLKPFMAELQPGDLGKAIPEGAVDNGQLRDVNEAIRSHAIEQVGKKLRGYMTDMKRIAVAG

SEQ ID NO: 345 - protein, 536 aa, Escherichia coli
MLTLQKLQYDVVNISISAINFLSYSEFNLANANRTIRSTTSRGITMANYFNTLNLRQQLAQLGKCRFMGRDEFADGASYLQGKKVVIVGCGAQGLNQGLNMRDSGLDISYALRKEAIAEKRASWRKATENGFKVGTYEELIPQADLVVNLTPDKQHSDVVHTVQPLMKDGAALGYSHGFNIVEVGEQIRKDITVVMVAPKCPGTEVREEYKRGFGVPTLIAVHPENDPKGEGMAIAKAWAAATGGHRAGVLESSFVAEVKSDLMGEQTILCGMLQAGSLLCFDKLVEEGTDPAYAEKLIQFGWETITEALKQGGITLMMDRLSNPAKLRAYALSEQLKEIMAPLFQKHMDDIISGEFSSGMMADWANDDKKLLTWREETGKTAFETAPQYEGKIGEQEYFDKGVLMIAMVKAGVELAFETMVDSGIIEESAYYESLHELPLIANTIARKRLYEMNVVISDTAEYGNYLFSYACVPLLKPFMAELQPGDLGKAIPEGAVDNAQLRDVNEAIRSHAIEQVGKKLRGYMTDMKRIAVAG

SEQ ID NO: 346 - protein, 532 aa, Yersinia bercovieri
MQNLQYHIVNISISAMCFLSYSESKVIPYTHKTESERSNTMANYFNTLNLRQQLAQLGKCRFMARDEFADEAGYLKGKKVVIVGCGAQGLNQGLNMRDSGLDVAYALRKEAIAEKRASWRKATENGFKVGSYEELIPQADLVVNLTPDKQHSAVVQAVQPLMKDGAALGYSHGFNIVEVGEQVRKDITVVMVAPKCPGTEVREEYKRGFGVPTLIAVHPENDPKGEGMAIAKAWAAATGGHRAGVLESSFVAEVKSDLMGEQTILCGMLQAGSLLCFDKLVSEGTDAAYAEKLVQFGWETITEALKQGGITLMMDRLSNPAKLRAYALSEQLKEIMASLFQKHMDDIISGEFSSGMMADWANDDAKLLGWREETGRTAFENAPQFEGKISEQEYFDHGVLMIAMVKAGVELAFETMVDSGIIEESAYYESLHELPLIANTIARKRLYEMNVVISDTAEYGNYLFANAAVPLLKGKFMDSLQAGDLGKSVAGTAVDNAQLRDANEAIRNHPIEAVGHKLRGYMTDMKRIAVAG

SEQ ID NO: 347 - protein, 532 aa, Yersinia mollaretii
MQNLQYDIVNISISAMCFLSYSESKVIPYTHKTESERSNTMANYFNTLNLRQQLAQLGKCRFMARDEFADEAGYLKGKKVVIVGCGAQGLNQGLNMRDSGLDVAYALRKEAIAEKRASWRKATENGFKVGTYEELIPQADLVVNLTPDKQHSAVVQAVQPLMKDGAALGYSHGFNIVEVGEQVRKDITVVMVAPKCPGTEVREEYKRGFGVPTLIAVHPENDPKGEGMAIAKAWAAATGGHRAGVLESSFVAEVKSDLMGEQTILCGMLQAGSLLCFDKLVSEGTDAAYAEKLVQFGWETITEALKQGGITLMMDRLSNPAKLRAYALSEQLKEIMAPLFQKHMDDIISGEFSSGMMADWANDDAKLLGWREETGRTAFENAPQFEGKISEQEYFDHGVLMIAMVKAGVELAFETMVDSGIIEESAYYESLHELPLIANTIARKRLYEMNVVISDTAEYGNYLFANAAVPLLKGKFMDSLQAGDLGKSVAGTAVDNAQLRDANEAIRNHPIEAVGHKLRGYMTDMKRIAVAG

SEQ ID NO: 348 - protein, 531 aa, Klebsiella pneumoniae
MQRDVVNISISAIKFLSYSKFILAKANRTISTTQHHGVTDMANYFNTLNLRQQLAQLGKCRFMARDEFADGASYLQGKKVVIVGCGAQGLNQGLNMRDSGLDISYALRKEAIAEKRASWRKATENGFKVGTYEELIPQADLVVNLTPDKQHSDVVRSVQPLMKDGAALGYSHGFNIVEVGEQIRKDITVVMVAPKCPGTEVREEYKRGFGVPTLIAVHPENNPKGEGMAIAKAWAAATGGHRAGVLESSFVAEVKSDLMGEQTILCGMLQAGSLLCFDKLVAEGTDPAYAEKLIQFGWETITEALKQGGITLMMDRLSNPAKLRAYALSEQLKEIMAPLFQKHMDDIISGEFSSGMMADWANDDKKLLTWREETGKTAFETAPQYEGKIGEQEYFDKGVLMIAMVKAGVELAFETMVASGIIEESAYYESLHELPLIANTIARKRLYEMNVVISDTAEYGNYLFSYACVPLLKEFMTTLQTGDLGTAIAEGAVDNAQLRDVNEAIRSHAIEQVGKKLRGYMTDMKRIAVAG

SEQ ID NO: 349 - protein, 514 aa, Vibrio harveyi
MNSFGNTNTDLYGRMLRSTQMANYFNTLNLREQLDQLGRCRFMDREEFASEADYLKGKKVVIVGCGAQGLNQGLNMRDSGLDVAYALRQAAIDEQRQSFKNAKDNGFEVGSYETLIPQADLVVNLTPDKQHTNVVETVMPLMKEGAALGYSHGFNVVEEGMQIRKDLTVVMVAPKCPGTEVREEYKRGFGVPTLIAVHPENDPKGEGWDIAKAWAAATGGHRAGCLESSFVAEVKSDLMGEQTILCGMLQAGSIVCYEKMIADGIDPGYAGKLLQYGWETITEALKFGGITHMMDRLSNPAKVKAFELSEELKELMRPLYNKHMDDIITGHFSSTMMADWANDDVNLLGWRAETGETAFENYPETDVEISEQEYFDNGILMVAMVRAGVELAFEAMTASGIIDESAYYESLHELPLIANTIARKRLYEMNVVISDTAEYGNYLFANVATPLLREKFMPAVNTDVIGKGLGETSNQVDNATLIAVNDAIRNHPVEYIGEELRGYMTDMKNIAVGG

SEQ ID NO: 350 - protein, 505 aa, Providencia stuartii
MPEITNTTEQRSKTMANYFNTLNLRQQLEQLGKCRFMKREEFADEAGYLKGKKIVIVGCGAQGLNQGLNMRDSGLDIAYALRAEAIAEKRASWRKATENGFKVGTYEELIPEADLVINLTPDKQHSAVVRAVQPMMKQGAALGYSHGFNIVEVGEEIRKDITVVMVAPKCPGTEVREEYKRGFGVPTLIAVHPENDPKGEGLAIAKAWAAATGGHRAGVLESSFVAEVKSDLMGEQTILCGMLQAGALLCYDKMVADGVEPGYAGKLIQFGWETITEALKQGGITLMMDRLSNPAKLRAFALSEQLKTIMAPLFQKHMDDIISGKFSETMMADWANDDKNLLAWREETGKTPFENYPEYEGKIAEQEYFDHGVLLVAMVKAGVELAFDTMLEAGILEESAYYESLHELPLIANTIARKRLYEMNVVISDTAEYGNYLFSFAAVPMLKDFMSKLQAGDLAKPVADNGTDNAQLRDVNEAIRNHPIEKIGKTLRGYMTDMKRISVGG

SEQ ID NO: 351 - protein, 505 aa, Yersinia ruckeri
MKITQHNIERSTTMANYFNTLNLRQQLAQLGKCRFMGREEFADEASYLKGKKVVIVGCGAQGLNQGLNMRDSGLDVAYALRKEAIAEKRASWHQATENGFKVGTYEELIPQADLVVNLTPDKQHSAVVRAVQPLMKDGAALGYSHGFNIVEVGEQVRKDITVVMVAPKCPGTEVREEYKRGFGVPTLIAVHPENDPKGEGMAIAKAWAAATGGHRAGVLASSFVAEVKSDLMGEQTILCGMLQAGSLLCFDKLVAEGTDKAYAEKLIQFGWETITEALKQGGITLMMDRLSNPAKLRAYALSEQLKDIMAPLFQKHMDDIISGAFSSGMMADWAEDDVKLLNWREETGKSAFENAPQYEGKISEQEYFDHGVLMIAMVKAGVELAFETMVDSGIIEESAYYESLHELPLIANTIARKRLYEMNVVISDTAEYGNYLFANAAVPLLKAKFMDSLQAGDLGKSVAGSAVDNAQLRDVNEAIRNHPIEAVGHKLRGYMKDMKRIAVAG

SEQ ID NO: 352 - protein, 503 aa, Vibrio sp.
MEESQRSTQMANYFNTLNLREQLDQLGRCRFMDRSEFASEADYLKGKKVVIVGCGAQGLNQGLNMRDSGLDVAYALRQAAIDEQRQSFKNAKDNGFEVGSYETLIPQADLVVNLTPDKQHTNVVETVMPLMKEGAALGYSHGFNVVEEGMQIRKDLTVVMVAPKCPGTEVREEYKRGFGVPTLIAVHPENDPKGEGWDIAKAWAAATGGHRAGCLESSFVAEVKSDLMGEQTILCGMLQAGSIVCYEKMIADGIDPGYAGKLLQYGWETITEALKFGGITHMMDRLTNPAKVKAFELSEELKELMRPLYNKHMDDIITGHFSSTMMADWANDDANLLGWRAETGETAFENYPETDVEISEQEYFDNGILMVAMVRAGVELAFEAMTASGIIDESAYYESLHELPLIANTIARKRLYEMNVVISDTAEYGNYLFANVATPLLREKFMPSVSTDVIGKGLGETSNQVDNATLIAVNETIRNHPVEYIGEELRGYMTDMKRIAVGG

SEQ ID NO: 353 - protein, 500 aa, Lacinutrix sp.
MSNYFNTLSLRNQLDQLGKCRFMDASEFEDGVNALKGKKIVIIGCGAQGLNQGLNMRDSGLDISYALRQQAIDEKRTSYKNATDNEFNVGTYDDLIPTADLVLNLTPDKQHTNVVKAVMPLMKKGATLSYSHGFNIVEEGTKIREDITVIMVAPKCPGTEVREEYKRGFGVPTLIAVHPENDPENKGWAQAKAYAAATGGHRAGVLESSFVAEVKSDLMGEQTILCGLLQTGAILSFDKMVAEGIEPGYAAKLIQFGWETITEALKHGGITNMMDRLSNPAKIKAYQLSEELKDIMRPLFEKHMDDIISGHFSKTMMEDWANDDVNLLKWRAETGETAFEKTTLTTDHISEQEYFDHGTLLVAFVKSGVELAYETMVSSGIIEDSAYYESLHELPLIANTIARKKLFEMNRVISDTAEYGCYLFDHACKPLLTDFMKTVDTDIIGKPFSASTGVDNVELIAVNDAIRNHPIETVGKRLRAAMTAMKIIKSDVKSEESVLA

SEQ ID NO: 354 - protein, 500 aa, Kordia algicida
MSNYFNKLSLREQLAQLGKCRFMDASEFTEGVNALKGKKIVIVGCGAQGLNQGLNMRDSGLDISYALRQAAIDEERNSYQNATSHGFKVGTYKQLIPEADLVLNLTPDKQHTNVVKAVMPLMKKGATLSYSHGFNIVEEGTKIREDITVIMVAPKCPGTEVREEYKRGFGVPTLIAVHPENDPENKGWAQAKAYAVATGGHRAGVLESSFIAEVKSDLMGEQTILCGVLQTGSILAFDKMVADGIDANYAAKLIQLGWETITEALKHGGITNMMDRLSNPAKLKAFELSEELKTIMKPLFEKHMDDIISGHFSKTMMEDWANDDKNLLKWREATGETAFEKTALTSDHISEQEYFDHGVLLVAFVKSGVELAFETMVHAGIIEDSAYYESLHELPLIANTIARKKLFEMNRVISDTAEYGCYLFDHAAKPLLTDFMKTVDTSVIGKSFATSNAVDNLDLIAVNDAIRNHPIEAVGKRLRAAMTAMKTIKTTVNNEKPIAV

SEQ ID NO: 355 - protein, 500 aa, Unknown
  Flavobacteriales bacterium
MSNYFNTLPLREQLEQLGKCRFMDASEFEDGVNALKGKKIVIVGCGAQGLNQGLNMRDSGLDISYTLRQIAIDQQRDSYKNATSNGFTVGTYEELIPTADLVLNLTPDKQHTNVVKAVMPLMKKGATLSYSHGFNIVEEGTKIREDLTVIMVAPKCPGTEVREEYKRGFGVPTLTAVHPENDPEGKGWAQAKAYAAATGGHRAGVLESSFIAEVKSDLMGEQTILCGLLQTGAILSFDKMVEEGIEPGYAAKLIQFGWETITEALKHGGITNMMDRLSNPAKIKAFELSEELKGIMRPLFQKHMDDIISGHFSKTMMEDWANDDVNLLKWRAATGETAFEKTALTTDHISEQEYFDNGVLLVAFVKSGVELAFETMVSAGIIEDSAYYESLHELPLIANTIARKKLFEMNRVISDTAEYGCYLFDHACKPLLTEFMKTFDTDIIGKSYSSSNGVDNIELIAVNDAIRNHPIEAVGQRLRTAMTAMKVIKSDVASKDAVLV

SEQ ID NO: 356 - protein, 499 aa, Leeuwenhoekiella blandensis
MSNYFNTLSLREQLAQLAKCRFMESEEFSNGVEALRGKKVVIVGCGAQGLNQGLNMRDSGLDISYALREGAIKEKRASYKNAVDNGFTVGTYDELIPTADLVCNLTPDKQHTAVVSTVMPLMKEGATLAYSHGFNIVEEGMQVRKDLTVIMCAPKCPGSEVREEYKRGFGVPTLIAVHPENDPEGKGLDQAKAYAVATGGHRAGVLESSFVAEVKSDLMGEQTILCGMLQTGSILCFDKMVEKEIDAGYASKLIQYGWETITEALKHGGITNMMDRLNNPSKIKAFELAEEIKDITRPLFHKHMDDIISGHFSKTMMEDWANDDANLLKWRAATGETAFEKTPAGSQEISEQEFFDHGVLMVAMVKAGVELAFETMTEAGIIEESAYYESLHETPLIANTIARKKLFEMNRVISDTAEYGCYLFDHACKPMLTEFMKGIDTNVIGKAYATDNSVDNKTLIAVNDAIRAHEVEAVGAWLRESMTAMKDIKTVASGEAVTA

SEQ ID NO: 357 - protein, 498 aa, Candidatus Blochmannia vafer
MSNYFNKLSFIQKLKHLGKCRLISTNEFSKGIQLLKFKKIVIIGCGSQGLNQGLNMRDSGLQVAYALRYESIINKTESYINAVRHGFVVGTYTELVPEADLVINLTPDKNHDFVINQIEPLMKYKSVLGYSHGFHIVEIGKKIRRDITVIMVAPKCPGTEVRREYERGFGVPSLIAVHEENNLSGSGIELAKAWAFALGSHKAGVLESSFVAEVKSDLMGEQTILCGMLQVGSILCFNRMVESGVDVAYAGKLVQNGWEVITEALKQGGITLMMDRLSNFSKLRAFELSKQLKKILRPVFEKHMENILTGFFSKEMIADWANKDCNLLSWRENTKKLLFEQAPVYDKKIPEQIYFDHGVLMVAMLKAGIELSFDIMIESGIKPESAYYESLHELPLIANTIARKRLYEMNMVISDTAEYGCYVFSNTVIPILQKEFMPNLKKGDLDNIMVNDVDNNHWVMSIDNVVLRDVNETIRSHPVEKIGVYLRSYMKKMVSLSF

SEQ ID NO: 358 - protein, 498 aa, Dokdonia donghaensis
MKNYFNTLPLRDQLSQLGKCRFMDASEFEDGIAAIADKKIVIVGCGAQGLNQGLNMRDSGCDISYALREGAITEKRQSYKNATSNGFTVGTYEELIPKADLVLNLTPDKQHTAVVKAVMPLMKQGATLAYSHGFNIVEEGMQVREDLTVIMVAPKCPGSEVREEYKRGFGVPTLIAVHPDNDPEGKGLAQAKAYAAATGGHRAGVLESSFVAEVKSDLMGEQTILCGVLQTGSILCFDKMVEKGVDPAYAGKLIQYGWETITEALKHGGITNMMDRLDNPSKIKAYNLSEELKDIMRPLFEKHMDDIISGHFSKTMMEDWAADDKNLHTWRAATGETNFEKQEITSQEISEQEYFDHGVLMVAMVKAGVELAFETMTAAGIIEESAYYESLHETPLIANTIARKKLFEMNRIISDTAEYGCYLFDHACKPLLTDFMKTVDTDIIGAAYAHDNGVDNQELIAVNDAIRNHPVEEIGATLRKAMVAMKKVKTEEQEAVLS

SEQ ID NO: 359 - protein, 496 aa, Bermanella marisrubri
MGQNYFNTLNLREQLDQLGQCRFMNRDEFSNGCEFLKGKKVVIIGCGAQGLNQGLNMRDSGLDVSYALREAAIAEKRQSWKNATDNGFTVGTYEELVPTADLVCNLTPDKQHTDAVSTVMPLMKQGATLGYSHGFNIVEEGMQIREDLTVVMVAPKCPGSEVREEYKRGFGVPTLIAVHPENDPKGEGLDIAKAWASATGGDRAGVLESSFVAEVKSDLMGEQTILCGMLQTGAILGYEKMVADGIDGPYAAKLIQFGWETVTEALKIGGITNMMDRLSNPAKIKAFDLADELKGLMRPLFRKHQDDIMTGEFSRTMMEDWANDDANLLKWRAETAETGFEKEGPCDVEIDEQEFFDKGILLVAMVKAGVELAFETMVESGIIEESAYYESLHETPLIANTIARKKLYEMNVVISDTAEYGCYLFSHAAVPLLREEFMPNIGTDVIGKGLELKSNSVDNARLVDVNEEIREHPVEWIGQELRGYMTDMKKIVEASK

SEQ ID NO: 360 - protein, 495 aa, Photobacterium damselae
MANYFNTLNLREQLDQLGRCRFMAREEFTAEADYLKGKQVVIVGCGAQGLNQGLNMRDSGLNVAYALRQVAIDEQRQSYRNAKDNGFEVGSYEQLIPQADLVINLTPDKQHTNVVNAVMPLMKQGATLGYSHGFNIVEEGMQVRSDLTVVMVAPKCPGTEVREEYKRGFGVPTLIAVHPENDPNGEGLAIAKAWAAATGGHRAGVLESSFVAEVKSDLMGEQTILCGMLQAGSIVCYEKMIADGIEPDYAGKLLQYGWETITEALKFGGITHMMDRLSNPAKVRAFELSEELKDLMRPLYNKHMDDIISGHFSATMMADWANDDINLLTWRNETGETAFENYPSSNLHIEEQEYFDNGILMVAMVRAGVELAFEAMTASGIIDESAYYESLHELPLIANTIARKRLYEMNVVISDTAEYGNYLFANVAVPLLREKFMAKVSTEDIGRGLSSHSQWADNQTLIEVNQTIRQHPVEVIGHTLRGYMTDMKRIAVGGE

SEQ ID NO: 361 - protein, 494 aa, Vibrio cholerae
MANYFNTLNLREQLDQLGRCRFMAREEFATEADYLKGKKVVIVGCGAQGLNQGLNMRDSGLDVSYALRQAAIDEQRQSFKNAKNNGFNVGSYEQLIPTADLVINLTPDKQHTSVVNAVMPLMKQGAALGYSHGFNIVEEGMQIRKDITVVMVAPKCPGTEVREEYKRGFGVPTLIAVHPENDPQGEGWEIAKAWAAATGGHRAGCLASSFVAEVKSDLMGEQTILCGMLQAGSIVCYEKMVADGIDPGYAGKLLQFGWETITEALKFGGITHMMDRLSNPAKIKAFELSEELKDLMRPLYNKHMDDIISGHFSSTMMADWANDDKDLFGWRAETAETTFENYPTTDVKIAEQEYFDNGILMIAMVRAGVELAFEAMTASGIIDESAYYESLHELPLIANTVARKRLYEMNVVISDTAEYGNYLFANVAVPLLREKFMPKVGTDVIGKGLGVVSNQVDNATLIEVNSIIRNHPVEYIGEELRGYMKDMKRIAVGD

SEQ ID NO: 362 - protein, 494 aa, Vibrio cholerae
MANYFNTLNLREQLDQLGRCRFMAREEFATEADYLKGKKVVIVGCGAQGLNQGLNMRDSGLDVSYALRQTAIDEQRQSFKNAKNNGFNVGSYEQLIPTADLVINLTPDKQHTSVVNAVMPLMKQGAALGYSHGFNIVEEGMQIRKDITVVMVAPKCPGTEVREEYKRGFGVPTLIAVHPENDPQGEGWEIAKAWAAATGGHRAGCLASSFVAEVKSDLMGEQTILCGMLQAGSIVCYEKMVADGIDPGYAGKLLQFGWETITEALKFGGITHMMDRLSNPAKIKAFELSEELKDLMRPLYNKHMDDIISGHFSSTMMADWANDDKDLFGWRAETAETAFENYPTTDVKIAEQEYFDNGILMIAMVRAGVELAFEAMTASGIIDESAYYESLHELPLIANTVARKRLYEMNVVISDTAEYGNYLFANVAVPLLREKFMPKVGTDVIGKGLRVVSNQVDNATLIEVNSIIRNHPVEYIGEELRGYMKDMKRIAVGD

SEQ ID NO: 363 - protein, 494 aa, Vibrio parahaemolyticus
MANYFNTLNLREQLDQLGRCRFMDREEFVSEADYLKGKKVVIVGCGAQGLNQGLNMRDSGLDVSYALRQAAIDEQRQSFKNAKDNGFEVGSYETLVPQADLVVNLTPDKQHTNVVETVMPLMKEGAALGYSHGFNVVEEGMQIRKDLTVVMVAPKCPGTEVREEYKRGFGVPTLIAVHPENDPKGEGWDIAKAWAAATGGHRAGCLESSFVAEVKSDLMGEQTILCGMLQAGSIVCYEKMIAEGIDPGYAGKLLQYGWETITEALKFGGITHMMDRLSNPAKIKAFELSEELKDLMRPLYNKHMDDIISGHFSSTMMADWANDDKNLLGWRAETGETAFENYPETDVEISEQEYFDNGILMIAMVRAGVELAFEAMTASGIIDESAYYESLHELPLIANTIARKRLYEMNVVISDTAEYGNYLFANVATPLLREKFMPSVGTDVIGKGLGETSNQVDNATLIAVNETIRNHPVEYIGEELRGYMTDMKRIAVGG

SEQ ID NO: 364 - protein, 494 aa, Vibrio cholerae
MANYFNTLNLREQLDQLGRCRFMAREEFATEADYLKGKKVVIVGCGAQGLNQGLNMRDSGLDVSYSLRQAAIDEQRQSFKNAKNNGFNVGSYEQLIPTADLVINLTPDKQHTSVVNAVMPLMKQGAALGYSHGFNIVEEGMQIRKDITVVMVAPKCPGTEVREEYKRGFGVPTLIAVHPENDPQGEGWEIAKAWAAATGGHRAGCLASSFVAEVKSDLMGEQTILCGMLQAGSIVCYEKMVADGIDPGYAGKLLQFGWETITEALKFGGITHMMDRLSNPAKIKAFELSEELKDLMRPLYNKHMDDIISGHFSSTMMADWANDDKDLFGWRAETAETAFENYPTTDVKIAEQEYFDNGILMIAMVRAGVELAFEAMTASGIIDESAYYESLHELPLIANTVARKRLYEMNVVISDTAEYGNYLFANVAVPLLREKFMPKVGTDVIGKGLGVVSNQVDNATLIEVNSIIRNHPVEYIGEELRGYMKDMKRIAVGD

SEQ ID NO: 365 - protein, 494 aa, Vibrio cholerae
MANYFNTLNLREQLDQLGRCRFMAREEFATEADYLKGKKVVIVGCGAQGLNQGLNMRDSGLDVSYALRQAAIDEQRQSFKNAKNNGFNVGSYEQLIPTADLVINLTPDKQHTSVVNAVMPLMKQGAALGYSHGFNIVEEGMQIRKDITVVMVAPKCPGTEVREEYKRGFGVPTLIAVHPENDPQSEGWEIAKAWAAATGGHRAGCLASSFVAEVKSDLMGEQTILCGMLQAGSIVCYEKMVADGIDPGYAGKLLQFGWETITEALKFGGITHMMDRLSNPAKIKAFELSEELKDLMRPLYNKHMDDIISGHFSSTMMADWANDDKDLFGWRAETAETAFENYPTTDVKIAEQEYFDNGILMIAMVRAGVELAFEAMTASGIIDESAYYESLHELPLIANTVARKRLYEMNVVISDTAEYGNYLFANVAVPLLREKFMPKVGTDVIGKGLGVVSNQVDNATLIEVNSIIRNHPVEYIGEELRGYMKDMKRIAVGD

SEQ ID NO: 366 - protein, 494 aa, Vibrio splendidus
MANYFNTLNLREQLDQLGRCRFMDREEFATEAEYLEGKKIVIVGCGAQGLNQGLNMRDSGLNVAYALRQAAIDEQRQSYKNAKENGFEVDSYEKLIPEADLVINLTPDKQHTNVVETVMPLMKEGAALGYSHGFNVVEEGMQIRKDLTVVMVAPKCPGTEVREEYKRGFGVPTLIAVHPENDPKGEGWDIAKAWAAGTGGHRAGCLESSFVAEVKSDLMGEQTILCGMLQAGSIVSYEKMVADGIDPSYAGKLLQYGWETITEALKFGGVTHMMDRLSNPAKIKAFELSEELKDLMRPLYNKHMDDIIQGEFSSTMMADWANDDANLLGWREETGETAFENYPASDVEISEQEYFDNGILLVAMVRAGVELAFEAMTASGIIDESAYYESLHELPLIANTVARKRLYEMNVVISDTAEYGNYLFANVATPLLREKFMPSVSTDVIGKGLGETSNQVDNARLIEVNEAIRNHPVEYIGEELRSYMSDMKRIAVGG

SEQ ID NO: 367 - protein, 494 aa, Vibrio cholerae
MANYFNTLNLREQLDQLGRCRFMAREEFATEADYLKGKKVVIVGCGAQGLNQGLNMRDSGLDVSYALRQAAIDEQRQSFKNAKNNGFNVGSYEQLIPTADLVINLTPDKQHTSVVNAVMPLMKQGAALGYSHGFNIVEEGMQIRKDITVVMVAPKCPGTEVREEYKRGFGVPTLIAVHPENDPQGEGWEIAKAWAAATGGHRAGCLASSFVAEVKSDLMGEQTILCGMLQAGSIVCYEKMVADGIDPGYAGKLLQFGWETITEALKFGGITHMMDRLSNPAKIKAFELSEELKDLMRPLYNKHMDDIISGHFSSTMMADWANDDKDLFGWRAETAETAFENYPTTDVKIAEQEYFDNGILMIAMVRAGVELAFEAMTASGIIDESAYYESLHELPLIANTVARKRLYEMNVVISDTAEYGNYLFANVAVPLLREKFMPKVGTDVIGKGLGVVSNQVDNATLIEVNSIIRNHPVEYIGEELRGYMKDMKRIAVGD

SEQ ID NO: 368 - protein, 494 aa, Vibrio vulnificus
MANYFNTLNLREQLDQLGRCRFMDRSEFATEADYLKGKKVVIVGCGAQGLNQGLNMRDSGLDVAYALRQAAIDEQRQSYKNAKENGFEVGSYETLIPQADLVVNLTPDKQHTNVVETVMPLMKEGAALGYSHGFNVVEEGMQIRKDLTVVMVAPKCPGTEVREEYKRGFGVPTLIAVHPENDPKGEGWDIAKAWAAATGGHRAGCLESSFVAEVKSDLMGEQTILCGMLQAGSIVCYEKMVAEGIDPGYAGKLLQYGWETITEALKFGGITHMMDRLSNPAKIKAFELSEELKDLMRPLYNKHMDDIISGHFSSTMMADWANDDANLLGWRAETGETAFENYPSTDVEISEQEYFDNGILMVAMVRAGVELAFEAMTASGIIDESAYYESLHELPLIANTIARKRLYEMNVVISDTAEYGNYLFANVATPLLREKFMPSVGTDVIGKGLGETSNQVDNATLIAVNETIRNHPVEYIGEELRGYMTDMKRIAVGG

SEQ ID NO: 369 - protein, 494 aa, Vibrio parahaemolyticus
MANYFNTLNLREQLDQLGRCRFMDREEFVSEADYLKGKKVVIVGCGAQGLNQGLNMRDSGLDVSYALRQAAIDEQRQSFKNAKDNGFEVGSYETLIPQADLVVNLTPDKQHTNVVETVMPLMKEGAALGYSHGFNVVEEGMQIRKDLTVVMVAPKCPGTEVREEYKRGFGVPTLIAVHPENDPKGEGWDIAKAWAAATGGHRAGCLESSFVAEVKSDLMGEQTILCGMLQAGSIVCYEKMIAEGIDPGYAGKLLQYGWETITEALKFGGITHMMDRLSNPAKIKAFELSEELKDLMRPLYNKHMDDIISGHFSSTMMADWANDDKNLLGWRAETGETAFENYPETDVEISEQEYFDNGILMVAMVRAGVELAFEAMTASGIIDESAYYESLHELPLIANTIARKRLYEMNVVISDTAEYGNYLFANVATPLLREKFMPSVGTDVIGKGLGETSNQVDNATLIAVNETIRNHPVEYIGEELRGYMTDMKRIAVGG

SEQ ID NO: 370 - protein, 494 aa, Vibrio fischeri
MSNYFNTLNLREQLDQLGRCRFMDREEFATEADYLKGKKVVIVGCGAQGLNQGLNMRDSGLDVAYALRQAAIDEQRQSYKNAKENGFEVASYETLIPQADLVINLTPDKQHTNVVETVMPLMKEGAALGYSHGFNVVEEGMQIRKDLTVVMVAPKCPGTEVREEYKRGFGVPTLIAVHPENDPKGEGWDIAKAWAAGTGGHRAGCLESSFVAEVKSDLMGEQTILCGMLQAGSIVSYEKMIADGIEPGYAGKLLQYGWETITEALKFGGVTHMMDRLSNPAKVKAFELSEELKELMRPLYNKHMDDIISGEFSRTMMADWANDDVNLFGWREETGQTAFENYPESDVEISEQEYFDNGILLVAMVRAGVELAFEAMTASGIIDESAYYESLHELPLIANTVARKRLYEMNVVISDTAEYGNYLFANVATPLLREKFMPSVETDVIGRGLGESSNQVDNATLIAVNDAIRNHPVEYVGEELRSYMSDMKRIAVGG

SEQ ID NO: 371 - protein, 494 aa, Aliivibrio salmonicida
MSNYFDTLNLREQLDQLGRCRFMDREEFSTEADYLKGKRVVIVGCGAQGLNQGLNMRDSGLNVAYALRQAAIDEQRQSFKNASENGFEVASYEKLIPQADLVINLTPDKQHTNVVETVMPLMKEGATLGYSHGFNIVEEGMKIRKDLTVVMVAPKCPGTEVREEYKRGFGVPTLIAVHPENDPKGEGWDIAKAWAAGTGGHRAGCLESSFVAEVKSDLMGEQTILCGMLQAGSIVCYEKMIADGIDASYAGKLLQFGWETVTEALKFGGVTHMMDRLSNPAKIKAFDLSEELKDLMRPLYNKHMDDIISGHFSSTMMADWANDDVNLLGWREETGETAFENYPDSSLEIPEQEYFDNGILMVAMVRAGVELAFEAMTASGIVDESAYYESLHELPLIANTVARKRLYEMNVVISDTAEYGNYLFANVATPLLREKFMPLVDTDVIGRGLGAISNQVDNAKLIEVNETIRNHPVEYIGEELRGYMTDMKTIAVGG

SEQ ID NO: 372 - protein, 494 aa, Vibrio splendidus
MANYFNTLNLREQLDQLGRCRFMDREEFTTEAEYLEGKKIVIVGCGAQGLNQGLNMRDSGLDVSYALRQAAIDEKRQSFKNADENGFVVGSYETLIPQADLVINLTPDKQHTNVVETVMPLMKEGAALGYSHGFNVVEEGMQLRADLTVVMVAPKCPGSEVREEYKRGFGVPTLIAVHPENDPKGEGWDIAKAWAAGTGGHRAGCLESSFVAEVKSDLMGEQTILCGMLQAGSIVSYEKMIADGIEPGYAGKLLQYGWETITEALKFGGVTHMMDRLSNPAKVKAFELSEELKDLMRPLYNKHMDDIISGHFSSTMMADWANDDVNLLGWREETGETAFENYPASDVEISEQEYFDNGILMVAMVRAGVELAFEAMTASGIIDESAYYESLHELPLIANTVARKRLYEMNVVISDTAEYGNYLFANVATPLLREKFMPSVATDVIGRGLGGTSNQVDNAKLIEVNEAIRNHPVEYIGEELRSYMSDMKRIAVGG

SEQ ID NO: 373 - protein, 494 aa, Tolumonas auensis
MANYFNTLNLRQQLEQLGKCRFMNRDEFASECDFLKGKKVVIVGCGAQGLNQGLNMRDSGLDVSYALRAEAIAEKRKSFKQASENGFTVGTYEDLIPTADLVVNLTPDKQHTSVVKAVMPLMKDGAALGYSHGFNIVEEGTQIRKDITVVMVAPKCPGTEVREEYKRGFGVPTLIAVHPENDPKGDGLAIAKAWAAATGGHRAGVLQSSFVAEVKSDLMGEQTILCGMLQAGSILCYEKMIADGIDAGYAGKLIQFGWETITEALKQGGITAMMDRLSNPAKLRAFELAEEMRVLMRPLFRKHQDDIISGAFSSGMMADWANNDADLFRWREETGASAFENAPAFDGAIAEQEYFDNGILMVAMVKAGVELAFETMTESGIIAESAYYESLHELPLIANTIARKRLYEMNVVISDTAEYGNYLFANAAVPLLKAHIMPKVGTDVIGKTLSVKDNGVDNVTLVQVNEIIRNHPIEQVGKVLRGYMKDMKRIAVGG

SEQ ID NO: 374 - protein, 494 aa, Vibrio sp.
MANYFNTLNLREQLDQLGRCRFMDRSEFASEADYLKGKKVVIVGCGAQGLNQGLNMRDSGLDVAYALRQAAIDEQRQSFKNAKDNGFEVGSYETLIPQADLVVNLTPDKQHTNVVETVMPLMKEGAALGYSHGFNVVEEGMQIRKDLTVVMVAPKCPGTEVREEYKRGFGVPTLIAVHPENDPKGEGWDIAKAWAAATGGHRAGCLESSFVAEVKSDLMGEQTILCGMLQAGSIVCYEKMIADGIDPGYAGKLLQYGWETITEALKFGGITHMMDRLTNPAKVKAFELSEELKELMRPLYNKHMDDIITGHFSSTMMADWANDDANLLGWRAETGETAFENYPETDVEISEQEYFDNGILMVAMVRAGVELAFEAMTASGIIDESAYYESLHELPLIANTIARKRLYEMNVVISDTAEYGNYLFANVATPLLREKFMPSVSTDVIGKGLGETSNQVDNATLIAVNETIRNHPVEYIGEELRGYMTDMKRIAVGG

SEQ ID NO: 375 - protein, 494 aa, Glaciecola agarilytica
MANYFNTLSLRQQLDQIGRCRFMQRSEFSEGCNFLKGKKIVIVGCGAQGLNQGLNMRDSGLDVAYALRQAAIDEKRDSFQRASGNGFTVGTYKELIPSADLVYNLTPDKQHSSVVEAIMPLMKEGASLGYSHGFNIVEEGQQIRSDITVVMCAPKCPGTEVREEYKRGFGVPTLIAVHPENDPQQQGWDIAKALASATGGDRAGVLESSFVAEVKSDLMGEQTILCGMQQAAAVLGYEKMVADGIDPAYAGALIQFGLEAITEALKIGGVTNMMDRLSNPAKIKAFDLSEQLKEMLKPLFGKHQDDIISGEFSRTMMEDWANGDANLLKWREETGKTGFENAPEYNGKIDEQEFFDNGVFIVAMIKAGVELAFDVMVEAGILPESAYYESLHETPLISNTIARKRLYEMNVVISDTAEYGNYLFANAAIPLLADKLMPSIGTELIGKPFAATSNSVDNKTLVAVNKAIREHGVESVGDTLRGYMTDMKAIVEAV

SEQ ID NO: 376 - protein, 494 aa, Treponema brennaborense
MEKVNYFNSIPWREALIQLGHCRFMDRAEFADGTNALKGKKIVIVGCGAQGLHQGMNLRDSGLDVSYALRESAIAEKRQSWKNAAENGFKVGTYDQMIPAADLVGNLTPDKQHSNVLEKVVPLMKKGSALWYSHGFNIVEEGMQIRPDITVVMMAPKGPGSEVRTEYMRGFGIPTLIAVHPVNDPDGKGWAIAKALAVGTGGSRAGVLESSFIAEVKSDLMGEQTILCGMLQTGSILCFNKMIEKGIDKGYASKLIQYGWETITEALKWGGITGMMDRLSNPAKLKAHALSKELKTIMCDLYHKHMDDIISGEFSRVMMIDWANDDINLHTWREATGKTAFEQTPAGAVEIAEQEYFDHGILMAAMVKAGVELAFETMVAAGIKPESAYYESLHEVPLIANLISRKKLYEMNKVISDTAEYGCYLFDNACRPLLKDFMAKIDTDVIGKGLSVKDNSVSNHELVYVNDEIRNHPIEIVGKKLRGYMTAMKAVIGK

SEQ ID NO: 377 - protein, 494 aa, Vibrio anguillarum
MANYFNTLNLRQQLDQLGRCRFMDRSEFESEAEYLKGKKVVIVGCGAQGLNQGLNLRDSGLDVSYALRQAAIDEQRQSYKNAKENGFEVGSYETLIPQADLVINLTPDKQHSNVVETIMPLMKKGAALGYSHGFNVVEEGMQIRKDITVVMVAPKCPGTEVREEYKRGFGVPTLLAVHPENDPQGEGWDIAKAWAAGTGGHRAGCLESSFVAEVKSDLMGEQTILCGMLQAGSIVCYEKMVAEGIDPGYAGKLLQYGWETVTEALKFGGITHMMDRLSNPAKIKAFELSEELKDLMRPLYNKHMDDIISGHFSSTMMADWANDDADLLGWRAETGETAFENYPQSDVQITEQEYFDKGILMIAMVRAGVELAFEAMTASGIVEESAYYESLHELPLIANTVARKRLYEMNVVISDTAEYGNYLFANVATPLLREKFMPKVSTDVIGKGLGESSNFVDNATLIEVNEILRNHPVEYIGEELRGYMTDMKRIAVGG

SEQ ID NO: 378 - protein, 494 aa, Flavobacterium branchiophilum
MANYFNSLPLREQLNQLGVCEFLDGSYFTAGVEALLGKKIVIIGCGAQGLNQGLNMRDSGLDIAFALRQEAIDGQRPSWKDATSHNFTVGTYETLIPTADLVINLTPDKQHSAVIAAVMPLMKQNATLSYSHGFNIVEEGMQIRKDITVIMVAPKCPGTEVRAEYVRGFGVPTLIAVHPENDPEGKGWDYAKAYCAATGGHRAGVLKSSFVAEVKSDLMGEQTILCGLLQTGSILCFDKMIEKGIEAGYASKLIQYGWETITEALKQGGITAMFDRLSNPAKIKAFEISEELKDIMRPLFQKHQDDIMSGEFSSTMMADWANNDKNLLTWRAATGETAFEKTPAGDVKIAEQEYFDNGLLMVAMVRAGVELAFETMVEAGIKEESAYYESLHETPLIANTIARRKLFEMNSVISDTAEYGCYLFDHACKPLLADFMTKVETNIIGKNFNEGKDHGVDNKTLIKVNEALRFHEIELIGAELREAMTDMKAISSLA

SEQ ID NO: 379 - protein, 494 aa, Glaciecola nitratireducens
MTNYFNTLPLRKQLDQLGRCRFMHRNEFADGCDYLKGQTIVIVGCGAQGLNQGLNMRDSGLNISYALRQAAIDEKRDSFERASSNGFIVGTYQDLIPGADLVYNLTPDKQHSSVVEAVMPLMKKGATLSYSHGFNIVEEGQQIRADITVVMCAPKCPGTEVREEYKRGFGVPTLIAVHPENDPENKGWAIAKALASATGGDRAGVLESSFVAEVKSDLMGEQTILCGMQQAGAILAFDKMVADGVDAAYAGALVQYGLEAITEALKIGGVTNMMDRLSNPAKIVAHELSVELTTLMRPLFEKHQDDIISGYFSTTMMEDWANGDANLFKWREETGQSGFENAPLYSGKISDQEFFDKGILLVAMIKAGVELAFDVMVEAGILPESAYYESLHETPLISNTIARKRLYEMNVVISDTAEYGNYLFANAAVPLLQKELMPKITAEHIGGGLTTQSMGVDNMKLVNVNKAIRSHGVESVGEKLRGYMTDMKAIVASA

SEQ ID NO: 380 - protein, 494 aa, Photobacterium profundum
MANYFNTLNLRQQLDQLGRCRFMDRNEFATEADYLKGKKVVIVGCGAQGLNQGLNMRDSGLDVSYALRQAAIDEQRQSYKNAKENGFDVGSYEQLIPIADLVVNLTPDKQHSNVVETVMPLMKEGAALGYSHGFNIVEEGMQIRKDITVVMVAPKCPGTEVREEYKRGFGVPTLIAVHPENDPKGDGQEIAKAWAAATGGHRAGVLESSFVAEVKSDLMGEQTILCGMLQAGSIVCYEKMIADGIDAGYAGKLLQYGWETITEALKFGGITHMMDRLSNPAKVKAFELSEELKDLMRPLYNKHMDNIITGHFSSTMMADWANDDVNLLGWREETGETAFENYPVTDVEIPEQEYFDNGILMVAMVRAGVELAFEAMTASGIVEESAYYESLHELPLIANTVARKRLYEMNVVISDTAEYGNYLFANVATPLLREKFMTDVDTDVIGRGLGEVSNQVSNETLIVVNETLRSHPVELVGQELRGYMTDMKRIAVGD

SEQ ID NO: 381 - protein, 494 aa, Vibrio fischeri; identical to SEQ ID NO: 87

SEQ ID NO: 382 - protein, 494 aa, Pseudoalteromonas atlantica
MANYFNTLSLRQQLDQIGRCRFMQRSEFSEGCDFLKGKKIVIVGCGAQGLNQGLNMRDSGLDVAYALRQAAIDEKRDSFQRASGNGFTVGTYKELIPSADLVYNLTPDKQHSSVVEAIMPLMKEGASLGYSHGFNIVEEGQQIRSDITVVMCAPKCPGTEVREEYKRGFGVPTLIAVHPENDPQQQGWDIAKALASATGGDRAGVLESSFVAEVKSDLMGEQTILCGMQQAAAVLGYEKMVADGIDPAYAGALIQFGLEAITEALKIGGVTNMMDRLSNPAKIKAFDLSEQLKDMLKPLFGKHQDDIISGEFSRTMMEDWANGDANLLKWREETGQTGFENAPEYNGKIDEQEFFDNGVFIVAMIKAGVELAFDVMVEAGILPESAYYESLHETPLISNTIARKRLYEMNVVISDTAEYGNYLFANAAIPLLADKLMPSIGTELIGKPFAAASNSVDNKTLVAVNKAIREHGVESVGDTLRGYMTDMKAIVEAV

SEQ ID NO: 383 - protein, 494 aa, Vibrio splendidus
MANYFNTLNLREQLDQLGRCRFMDREEFTTEAEYLEGKKIVIVGCGAQGLNQGLNMRDSGLDVSYALRQAAIDEKRQSFKNADENGFVVGSYETLIPQADLVINLTPDKQHTNVVETVMPLMKQGAALGYSHGFNVVEEGMQLRADLTVVMVAPKCPGSEVREEYKRGFGVPTLIAVHPENDPKGEGWDIAKAWAAGTGGHRAGCLESSFVAEVKSDLMGEQTILCGMLQAGSIVSYEKMIADGIEPGYAGKLLQYGWETITEALKFGGVTHMMDRLSNPAKVKAFELSEELKDLMRPLYNKHMDDIISGHFSSTMMADWANDDVNLLGWREETGATAFENYPTSDVEISEQEYFDNGILMVAMVRAGVELAFEAMTASGIIDESAYYESLHELPLIANTVARKRLYEMNVVISDTAEYGNYLFANVATPLLREKFMPSVATDVIGRGLGETSNQVDNAKLIEVNEAIRNHPVEYIGEELRSYMSDMKRIAVGG

SEQ ID NO: 384 - protein, 494 aa, Vibrio sp.
MANYFNTLNLREQLDQLGRCRFMDREEFTTEAEYLEGKKIVIVGCGAQGLNQGLNMRDSGLDVSYALRQAAIDEKRQSFKNADENGFVVGSYETLIPQADLVINLTPDKQHTNVVETVMPLMKQGAALGYSHGFNVVEEGMQLRSDLTVVMVAPKCPGSEVREEYKRGFGVPTLIAVHPENDPKGEGWDIAKAWAAGTGGHRAGCLESSFVAEVKSDLMGEQTILCGMLQAGSIVSYEKMIADGIEPGYAGKLLQYGWETITEALKFGGVTHMMDRLSNPAKVKAFELSEELKDLMRPLYNKHMDDIISGHFSSTMMADWANDDVNLLGWREETGETAFENYPASDVEISEQEYFDNGILMVAMVRAGVELAFEAMTASGIIDESAYYESLHELPLIANTVARKRLYEMNVVISDTAEYGNYLFANVATPLLREKFMPSVATDVIGRGLGETSNQVDNAKLIEVNEAIRNHPVEYIGEELRSYMSDMKRIAVGG

SEQ ID NO: 385 - protein, 494 aa, Reinekea sp.
MSNYFNTLNLREQLEQLGQCRFMDRNEFADECEYLKGKKVVIVGCGAQGLNQGLNMRDSGLDVSFALRQAAIDEKRQSWKNATENGFNVGSYEDLIPQADLVVNLTPDKQHTSVVNAVMPLMKTGSALGYSHGFNIVEEGLKVRDDITVVMVAPKCPGTEVREEYKRGFGVPTLIAVHPENDPRGEGMAIAKAWAAATGGHRAGVLQSSFVAEVKSDLMGEQTILCGMLQAGSILCYDKMTAEGVDATYAAKLVQYGWETVTEALKFGGITTMMDRLDNPSKIRAHELAEEMKDILRPLFRKHQDDIISGAFSSGMMADWEAGDKDLLNWREETGQTAFEKAPEVQNDLDEQEYFDNGILMIAMVKAGVELAFETMVESGIIEESAYYESLHELPLIANTIARKKLYEMNVVISDTAEYGNYLFANAAVPLLAEKIMPNVSTDVIGKGLDKSSNSVDNMTLVQVNDAIRNHPIEFIGEELRGYMTDMKRIVDVA

SEQ ID NO: 386 - protein, 494 aa, Photobacterium sp.
MANYFNTLNLRQQLDQLGRCRFMDRAEFATEADYLKGKKVVIVGCGAQGLNQGLNMRDSGLDVSYALRQAAIDEQRQSFKNAKENGFEVGSYEQLIPQADLVVNLTPDKQHTNVVETVMPLMKQGASLGYSHGFNIVEEGMQIRKDLTVVMVAPKCPGTEVREEYKRGFGVPTLIAVHPENDPQGDGLEIAKAWAAATGGHRAGVLESSFVAEVKSDLMGEQTILCGMLQAGSIVCYEKMIADGIAPEYAGKLLQYGWETITEALKFGGVSHMMDRLSNPAKVKAFDLSEELKDLMRPLYNKHMDDIISGHFSSTMMADWANDDADLLGWRGETAETQFENYPSSDIQISEQEYFDNGIIMVAMVRAGVELAFEAMTASGIIDESAYYESLHELPLIANTIARKRLYEMNVVISDTAEYGNYLFANVATPLLREQFMPKVATDVIGKGLGETSNFADNQKLIEVNEALRNHPVEVIGKELRGYMKDMKQIAVGG

SEQ ID NO: 387 - protein, 494 aa, Photobacterium profundum
MANYFNTLNLRQQLDQLGRCRFMDRNEFAAEADYLKGKKVVIVGCGAQGLNQGLNMRDSGLDVSYALRQAAIDEQRQSYKNAKENGFDVGSYEQLIPIADLVVNLTPDKQHSNVVETVMPLMKEGAALGYSHGFNIVEEGMQIRKDITVVMVAPKCPGTEVREEYKRGFGVPTLIAVHPENDPKGDGQEIAKAWAAATGGHRAGVLESSFVAEVKSDLMGEQTILCGMLQAGSIVCYEKMIADGIDAGYAGKLLQYGWETITEALKFGGITHMMDRLSNPAKVKAFELSEELKDLMRPLYNKHMDDIITGHFSSTMMADWANDDVNLLGWREETGETAFENYPTTDVEIPEQEYFDNGILMVAMVRAGVELAFEAMTASGIVEESAYYESLHELPLIANTVARKRLYEMNVVISDTAEYGNYLFANVATPLLREKFMADVDTDVIGRGLGEVSNQVSNETLIVVNETLRSHPVEWVGQELRGYMTDMKRIAVGD

SEQ ID NO: 388 - protein, 494 aa, Vibrio angustum
MANYFNTLNLRQQLDQLGRCRFMDRAEFATEADYLKGKKVVIVGCGAQGLNQGLNMRDSGLDVSYALRQAAIDEQRQSFKNAKENGFEVGSYEQLIPQADLVVNLTPDKQHTNVVETVMPLMKQGASLGYSHGFNIVEEGMQIRKDLTVVMVAPKCPGTEVREEYKRGFGVPTLIAVHPENDPQGDGLEIAKAWAAATGGHRAGVLESSFVAEVKSDLMGEQTILCGMLQAGSIVCYEKMIADGIAPEYAGKLLQYGWETITEALKFGGVSHMMDRLSNPAKVKAFDLSEELKDLMRPLYNKHMDDIISGHFSSTMMADWANDDADLLGWRGETAETQFENYPSSDIQISEQEYFDNGILMVAMVRAGVELAFEAMTASGIIDESAYYESLHELPLIANTIARKRLYEMNVVISDTAEYGNYLFANVATPLLREQFMPKVATDVIGKGLGETSNFADNQKLIEVNEALRNHPVEVIGKELRGYMKDMKQIAVGG

SEQ ID NO: 389 - protein, 494 aa, Vibrio alginolyticus
MANYFNTLNLREQLDQLGRCRFMDRSEFASEADYLKGKKVVIVGCGAQGLNQGLNMRDSGLDVAYALRQAAIDEQRQSFKNAKDNGFEVGSYETLIPQADLVVNLTPDKQHTNVVETVMPLMKEGAALGYSHGFNVVEEGMQIRKDLTVVMVAPKCPGTEVREEYKRGFGVPTLIAVHPENDPKGEGWDIAKAWAAATGGHRAGCLESSFVAEVKSDLMGEQTILCGMLQAGSIVCYEKMIADGIDPGYAGKLLQYGWETITEALKFGGITHMMDRLTNPAKVKAFELSEELKELMRPLYNKHMDDIITGHFSSTMMADWANDDANLLGWRAETGETAFENYPETDVEISEQEYFDNGILMVAMVRAGVELAFEAMTASGIIDESAYYESLHELPLIANTIARKRLYEMNVVISDTAEYGNYLFANVATPLLREKFMPAVNTDVIGKGLGETSNQVDNATLIAVNETIRNHPVEYIGEELRGYMTDMKRIAVGG

SEQ ID NO: 390 - protein, 494 aa, Unknown
  Vibrionales bacterium
MANYFNTLNLREQLDQLGRCRFMDREEFATEAEYLEGKKIVIVGCGAQGLNQGLNMRDSGLNVAYALRQAAIDEQRQSYKNAKENGFEVDSYEKLIPEADLVINLTPDKQHTNVVETVMPLMKEGAALGYSHGFNVVEEGMQIRKDLTVVMVAPKCPGTEVREEYKRGFGVPTLIAVHPENDPKGEGWDIAKAWAAGTGGHRAGCLESSFVAEVKSDLMGEQTILCGMLQAGSIVSYEKMVADGIDPSYAGKLLQYGWETITEALKFGGVTHMMDRLSNPAKIKAFELSEELKDLMRPLYNKHMDDIIQGEFSSTMMADWANDDANLLGWREETGETAFENYPASDVEISEQEYFDNGILLVAMVRAGVELAFEAMTASGIIDESAYYESLHELPLIANTVARKRLYEMNVVISDTAEYGNYLFANVATPLLREKFMPSVATDVIGRGLGEVSNQVDNAKLIEVNEAIRNHPVEYIGEELRSYMSDMKRIAVGG

SEQ ID NO: 391 - protein, 494 aa, Vibrio shilonii
MANYFNTLNLREQLDQLGRCRFMDRSEFASEADYLKGKKVVIVGCGAQGLNQGLNMRDSGLDVSYALRQAAIDEQRQSFKNAKDNGFVVGSYEDLIPQADLVVNLTPDKQHTNVVETVMPLMKEGASLGYSHGFNIVEEGMQIRKDLTVVMVAPKCPGTEVREEYKRGFGVPTLIAVHPENDPQGDGLEIAKAWAAATGGHRAGVLESSFVAEVKSDLMGEQTILCGMLQAGSIVCYEKMIADGIDPSYAGKLLQFGWETITEALKFGGITHMMDRLSNPAKVKAFDLSEELKDLMRPLYNKHMDDIIQGEFSSTMMADWANDDVNLLGWRAETAETAFENYPASDVEISEQEYFDNGILMVAMVRAGVELAFEAMTASGIIDESAYYESLHELPLIANTIARKRLYEMNVVISDTAEYGNYLFANVATPLLREKFMPSVGTDVIGKGLGETSNQVDNGKLIEVNDVIRNHPVEYIGEELRGYMTDMKRIAVGG

SEQ ID NO: 392 - protein, 494 aa, Vibrio cholerae
MANYFNTLNLREQLDQLGRCRFMAREEFATEADYLKGKKVVIVGCGAQGLNQGLNMRDSGLDVSYALRQAAIDEQRQSFKNAKNNGFNVGSYEQLIPTADLVINLTPDKQHTSVVNAVMPLMKQGAALGYSHGFNIVEEGMQVRKDITVVMVAPKCPGTEVREEYKRGFGVPTLIAVHPENDPQGEGWEIAKAWAAATGGHRAGCLASSFVAEVKSDLMGEQTILCGMLQAGSIVCYEKMVADGIDPGYAGKLLQFGWETITEALKFGGITHMMDRLSNPAKIKAFELSEELKDLMRPLYNKHMDDIISGHFSSTMMADWANDDKDLFGWRAETAETAFENYPTTDVKIAEQEYFDNGILMIAMVRAGVELAFEAMTASGIIDESAYYESLHELPLIANTVARKRLYEMNVVISDTAEYGNYLFANVAVPLLREKFMPKVGTDVIGKGLGVVSNQVDNATLIEVNSIIRNHPVEYIGEELRGYMKDMKRIAVGD

SEQ ID NO: 393 - protein, 494 aa, Vibrio sp.
MANYFNTLNLRQQLDQLGRCRFMDREEFASEADYLKGKKVVIVGCGAQGLNQGLNMRDSGLDVAYALRQAAIDEQRQSFKNAKDNGFEVGSYETLIPQADLVVNLTPDKQHTNVVETVMPLMKEGAALGYSHGFNIVEEGMQIRKDLTVVMVAPKCPGTEVREEYKRGFGVPTLIAVHPENDPKGEGWDIAKAWAAATGGHRAGCLESSFVAEVKSDLMGEQTILCGMLQAGSIVCYEKMIADGIDPGYAGKLLQYGWETITEALKFGGITHMMDRLTNPAKVRAFELSEELKDLMRPLYNKHMDDIITGHFSSTMMADWANDDVNLLGWRAETGETAFENYPEANTEISEQEYFDNGILMVAMVRAGVELAFEAMTASGIIDESAYYESLHELPLIANTIARKRLYEMNVVISDTAEYGNYLFANVATPLLREKFMPAVNTDVIGKGLGETSNQVDNATLIAVNDAIRNHPVEYIGEELRGYMTDMKNIAVGG

SEQ ID NO: 394 - protein, 494 aa, Vibrio cholerae
MANYFNTLNLREQLDQLGRCRFMAREEFATEADYLKGKKVVIVGCGAQGLNQDLNMRDSGLDVSYALRQAAIDEQRQSFKNAKNNGFNVGSYEQLIPTADLVINLTPDKQHTSVVNAVMPLMKQGAALGYSHGFNIVEEGMQIRKDITVVMVAPKCPGTEVREEYKRGFGVPTLIAVHPENDPQGEGREIAKAWAAATGGHRAGCLASSFVAEVKSDLMGEQTILCGMLQAGSIVCYEKMVADGIDPGYAGKLLQFGWETITEALKFGGITHMMDRLSNPAKIKAFELSEELKDLMRPLYNKHMDDIISGHFSSTMMADWANDDKDLFGWRAETAETAFENYPTTDVKIAEQEYFDNGILMIAMVRAGVELAFEAMTASGIIDESAYYESLHELPLIANTVARKRLYEMNVVISDTAEYGNYLFANVAVPLLREKFMPKVGTDVIGKGLGVVSNQVDNATLIEVNSIIRNHPVEYIGEELRGYMKDMKRIAVGD

SEQ ID NO: 395 - protein, 494 aa, Unknown
  Verrucomicrobiae bacterium
MSRKNYFNTLTLAQKLEQLGRCRFMNASEFNGVEALKGKKVVIVGCGAQGLNQGLNMRDSGLDVSYTLREAAISEKRQSWKNATENGFAVGTYAEMLPTADLVLNLTPDKQHTAVINAVQPLMKKGATLAYSHGFNIVEEGMEIREDLTVIMVAPKSPGTEVREEYKRGFGVPTLLAVHTENDPEGKGWDTAKAYAAATGGDRAGCLESSFIAEVKSDLMGEQTILCGLLQAGSLLAYDKMIEEGIEAGWASKFVQHSFDTICEALKHGGITNMMDRLSNPAKLKAFELSEQLKDIMRDLFDKHQEDIMSGAFSSGMMADWDKDDVDLLAWREATNTTAFEKSTAGDVEISEQEYFDKGILMVAFVRAGVELAFESMTNAGIKAESAYYESLHETPLIANTIGRKKLYEMNKVISDTAEYGCYLFSNAAIPLLGDFMKGVKTDVIGKGLECGCAAVDNQELVAANAKIRSHGVEKIGAVLRGHMGAMAKIAVGG

SEQ ID NO: 396 - protein, 494 aa, Vibrio parahaemolyticus
MANYFNTLNLREQLDQLGRCRFMDRSEFATEADYLKGKKVVIVGCGAQGLNQGLNMRDSGLNVAYALRQAAIDEQRQSYKNAKENGFEVGSYENLIPEADLVINLTPDKQHTNVVETVMPLMKEGAALGYSHGFNVVEEGMQIRKDLTVVMVAPKCPGTEVREEYKRGFGVPTLIAVHPENDPKGEGWDIAKAWAAGTGGHRAGCLESSFVAEVKSDLMGEQTILCGMLQAGSIVSYEKMVADGIDPSYAGKLLQYGWETITEALKFGGITHMMDRLSNPAKIKAFELSEELKELMRPLYNKHMDDIITGEFSRTMMADWANDDANLLGWRAETGETAFENYPAGDVEISEQEYFDNGILMVAMVRAGVELAFEAMTASGIIDESAYYESLHELPLIANTVARKRLYEMNVVISDTAEYGNYLFANVATPLLREKFMPSVGTDVIGKGLGETSNQVDNATLIAVNDTIRNHPVEYIGEELRGYMTDMKNIAVGG

SEQ ID NO: 397 - protein, 494 aa, Vibrio mimicus
MANYFNTLNLREQLDQLGRCRFMAREEFATEADYLKGKKVVIVGCGAQGLNQGLNMRDSGLDVSYALRQAAIDEQRQSFKNAKSNGFNVGSYEQLIPTADLVVNLTPDKQHTSVVNAVMPLMKQGAALGYSHGFNIVEEGMQIRKDITVVMVAPKCPGTEVREEYKRGFGVPTLIAVHPENDPQGEGWEIAKAWAAATGGHRAGCLASSFVAEVKSDLMGEQTILCGMLQAGSIVCYEKMVADGIDPGYAGKLLQFGWETVTEALKFGGITHMMDRLSNPAKIRAFELSEELKDLMRPLYNKHMDDIISGHFSSTMMADWANDDKDLFGWRAETAETAFENYPTTDVKIAEQEYFDNGILMIAMVRAGVELAFEAMTASGIIDESAYYESLHELPLIANTVARKRLYEMNVVISDTAEYGNYLFANVAVPLLREKFMPKVGTDVIGKGLGAVSNQVDNATLIEVNSIIRNHPVEYIGEELRGYMKDMKRIAVGD

SEQ ID NO: 398 - protein, 494 aa, Vibrio mimicus
MANYFNTLNLREQLDQLGRCRFMAREEFATEADYLKGKKVVIVGCGAQGLNQGLNMRDSGLDVSYALRQAAIDEQRQSFKNAKNNGFNVGSYEQLIPTADLVVNLTPDKQHTSVVNAVMPLMKQGAALGYSHGFNIVEEGMQIRKDITVVMVAPKCPGTEVREEYKRGFGVPTLIAVHPENDPQGEGWEIAKAWAAATGGHRAGCLASSFVAEVKSDLMGEQTILCGMLQAGSIVCYEKMVADGIDPGYAGKLLQFGWETVTEALKFGGITHMMDRLSNPAKIKAFELSEELKDLMRPLYNKHMDDIISGHFSSTMMADWANDDKDLFGWRAETAETAFENYPTTDVKIAEQEYFDNGILMIAMVRAGVELAFEAMTASGIIDESAYYESLHELPLIANTVARKRLYEMNVVISDTAEYGNYLFANVAVPLLREKFMPKVGTDVIGKGLGAVSNQVDNATLIEVNSIIRNHPVEYIGEELRGYMKDMKRIAVGD

SEQ ID NO: 399 - protein, 494 aa, Vibrio furnissii
MANYFNTLNLREQLDQLGRCRFMAREEFATEADYLKGKKVVIVGCGAQGLNQGLNMRDSGLDVAYALRQAAIDEKRQSYKNAKDNGFVVGSYEDLIPQADLVVNLTPDKQHSNVVETVMPLMKQGAALGYSHGFNIVEEGMQIRPDLTVVMVAPKCPGTEVREEYKRGFGVPTLIAVHPENDPKGEGWDIAKAWAAATGGHRAGCLESSFVAEVKSDLMGEQTILCGMLQAGSIVCYEKMIADGIEPGYAGKLLQFGWETVTEALKFGGITHMMDRLSNPAKIKAFELSEELKDLLRPLYNKHMDDIISGHFSSTMMADWANDDVNLLGWRAETAETAFENYPATDVKIAEQEYFDNGILMIAMVRAGVELAFEAMTASGIIDESAYYESLHELPLIANTIARKRLYEMNVVISDTAEYGNYLFANVATPLLREKFMPNVGTDVIGKGLGETSNQVDNATLIEVNSIIRNHPVEYIGEELRGYMKDMKRIAVGD

SEQ ID NO: 400 - protein, 494 aa, Vibrio metschnikovii
MANYFNTLNLREQLDQLGRCRFMAREEFASEADYLKGKKIVIVGCGAQGLNQGLNMRDSGLDIAYALRQAAIDEQRQSYKNAQSNGFQVGSYETLIPQADLVINLTPDKQHTNVVESIMPLMKQGAALGYSHGFNIVEEGMQIRKDITVVMVAPKCPGTEVREEYKRGFGVPTLIAVHPENDPQGEGWEIAKAWAAATGGHRAGCLESSFIAEVKSDLMGEQTILCGMLQAGSIVCYEKMVAEGVDPSYAGKLLQYGWETITEALKFGGITHMMDRLSNPVKVKAFELSEQLKDLLRPLYNKHMDDIIAGHFSRTMMADWANDDAELLGWRAETAQTAFENYPDSNIKIAEQEYFDNGILMIAMVRAGVELAFEAMTASGIIDESAYYESLHELPLIANTIARKRLYEMNVVISDTAEYGNYLFANVATPLLREQFMPSVSTDVIGKGLGAVSNQVDNATLIEVNSAIRNHPVEYIGEELRGYMQDMKRIAVGD

SEQ ID NO: 401 - protein, 494 aa, Vibrio coralliilyticus
MANYFNTLNLREQLDQLGRCRFMDRSEFATEADYLKGKKVVIVGCGAQGLNQGLNMRDSGLDVAYALRQAAIDEQRQSFKNAKENGFEVGSYETLIPQADLVVNLTPDKQHTNVVETVMPLMKEGAALGYSHGFNIVEEGMQIRKDLTVVMVAPKCPGTEVREEYKRGFGVPTLIAVHPENDPKGEGWDIAKAWAAGTGGHRAGCLESSFVAEVKSDLVGEQTILCGMLQAGSIVSYEKMVAEGIDPSYAGKLIQYGWETITEALKFGGITHMMDRLSNPAKIKAFELSEELKELMRPLYNKHMDDVITGHFSSTMMADWANDDANLLGWRAETGETAFENYPAGDVEISEQEYFDNGILMVAMVRAGVELAFEAMTASGIIDESAYYESLHELPLIANTVARKRLYEMNVVISDTAEYGNYLFANVATPLLREKFMPSIGTDVIGKGLGEESNQVDNATLIAVNETIRNHPVEYIGEELRGYMTDMKRIAVGG

SEQ ID NO: 402 - protein, 494 aa, Vibrio parahaemolyticus
MANYFNTLNLREQLDQLGRCRFMDREEFVSEADYLKGKKVVIVGCGAQGLNQGLNMRDSGLDVSYALRQAAIDEQRQSFKNAKDNGFEVGSYETLIPQADLVVNLTPDKQHTNVVETVMPLMKEGAALGYSHGFNVVEEGMQIRKDLTVVMVAPKCPGTEVREEYKRGFGVPTLIAVHPENDPKGEGWDIAKAWAAATGGHRAGCLESSFVAEVKSDLMGEQTILCGMLQAGSIVCYEKMIAEGIDPGYAGKLLQYGWETITEALKFGGITHMMDRLSNPAKIKAFELSEELKDLMRPLYNKHMDDIISGHFSSTMMADWANDDKNLLGWRAETGETAFENYPETDVEISEQEYFDNGILMIAMVRAGVELAFEAMTASGIIDESAYYESLHELPLIANTIARKRLYEMNVVISDTAEYGNYLFANVATPLLREKFMPSVGTDVIGKGLGETSNQVDNATLIAVNETIRNHPVEYIGEELRGYMTDMKRIAVGG

SEQ ID NO: 403 - protein, 494 aa, Vibrio sp.
MANYFNTLNLREQLDQLGRCRFMAREEFATEADYLKGKKVVIVGCGAQGLNQGLNMRDSGLDVSYALRQAAIDEQRQSFKNAKNNGFNVGSYEQLIPTADLVVNLTPDKQHTSVVNAVMPLMKQGAALGYSHGFNIVEEGMQIRKDITVVMVAPKCPGTEVREEYKRGFGVPTLIAVHPENDPQGEGWEIAKAWAAATGGHRAGCLASSFVAEVKSDLMGEQTILCGMLQAGSIVCYEKMVADGIDPGYAGKLLQFGWETVTEALKFGGITHMMDRLSNPAKIKAFELSEELKDLMRPLYNKHMDDIISGHFSSTMMADWANDDKDLFGWRAETAETAFENYPTTDVKIAEQEYFDNGILMIAMVRAGVELAFEAMTASGIIDESAYYESLHELPLIANTVARKRLYEMNVVISDTAEYGNYLFANVAVPLLREKFMPKVGTDVIGKGLGAMSNQVDNATLIEVNSIIRNHPVEYIGEELRGYMKDMKRIAVGD

SEQ ID NO: 404 - protein, 494 aa, Vibrio orientalis
MANYFNTLNLREQLDQLGRCRFMDRSEFATEADYLKGKKVVIVGCGAQGLNQGLNMRDSGLNVAYALRQAAIDEQRQSYKNAKENGFEVASYETLIPEADLVINLTPDKQHTNVVETVMPLMKQGAALGYSHGFNVVEEGMQIRKDLTVVMVAPKCPGTEVREEYKRGFGVPTLIAVHPENDPKGEGWDIAKAWAAGTGGHRAGCLESSFVAEVKSDLMGEQTILCGMLQAGSIVSYEKMIADGIDPSYAGKLLQYGWETITEALKFGGITHMMDRLSNPAKIKAFELSEELKELMRPLYNKHMDDIITGEFSRTMMADWANDDANLLGWREETGETAFENYPASDVEISEQEYFDNGILLVAMVRAGVELAFEAMTASGIIDESAYYESLHELPLIANTVARKRLYEMNVVISDTAEYGNYLFANVATPLLREKFMPSVSTDVIGKGLGETSNQVDNATLIAVNDTIRNHPVEYIGEELRGYMTDMKNIAVGG

SEQ ID NO: 405 - protein, 494 aa, Vibrio mimicus
MANYFNTLNLREQLDQLGRCRFMAREEFATEADYLKGKKVVIVGCGAQGLNQGLNMRDSGLDVSYALRQAAIDEQRQSFKNAKNNGFNVGSYEQLIPTADLVVNLTPDKQHTSVVNAVMPLMKQGAALGYSHGFNIVEEGMQIRKDITVVMVAPKCPGTEVREEYKRGFGVPTLIAVHPENDPQGEGWEIAKAWAAATGGHRAGCLASSFVAEVKSDLMGEQTILCGMLQAGSIVCYEKMVADGIDPGYAGKLLQFGWETVTEALKFGGITHMMDRLSNPAKIRAFELSEELKDLMRPLYNKHMDDIISGHFSSTMMADWANDDKDLFGWRAETAETAFENYPTTDVKIAEQEYFDNGILMIAMVRAGVELAFEAMTASGIIDESAYYESLHELPLIANTVARKRLYEMNVVISDTAEYGNYLFANVAVPLLREKFMPKVGTDVIGKGLGAVSNQVDNATLIEVNSIIRNHPVEYIGEELRGYMKDMKRIAVGD

SEQ ID NO: 406 - protein, 494 aa, Grimontia hollisae
MSNYFNTLNLREQLAQLGVCRFMDKAEFANEADYLKGKKVVIVGCGAQGLNQGLNMRDSGLDVSYALRQAAIDEQRQSYKNAKENGFNVDNYENLIPQADLVVNLTPDKQHTAVVSAVMPLMKQGAALGYSHGFNIVEEGMQIRSDITVVMVAPKCPGTEVREEYKRGFGVPTLIAVHPENDPNGDGLEIAKAWAAATGGHRAGVLESSFVAEVKSDLMGEQTILCGMLQAGSIVCYEKMVADGIDPGYAGKLLQFGWETITEALKFGGITHMMDRLSNPAKVKAFELSEDLKDLMRPLYNKHMDDIISGHFSSTMMADWANNDADLLGWRAETAETAFENYPETDVKIAEQEYFDNGILMVAMVRAGVELAFEAMTASGIIEESAYYESLHELPLIANTIARKRLYEMNVVISDTAEYGNYLFANVATPLLREKFMPLVGTDVIGKGLGETGNHVDNQTLIDVNDALRNHPVEWIGQELRGYMTDMKRIAVGD

SEQ ID NO: 407 - protein, 494 aa, Vibrio sp.
MANYFNTLNLREQLDQLGRCRFMAREEFATEADYLRGKKVVIVGCGAQGLNQGLNMRDSGLDVSYALRQAAIDEQRQSFKNAKNNGFNVGSYEQLIPTADLVVNLTPDKQHTSVVNAVMPLMKQGAALGYSHGFNIVEEGMQIRKDITVVMVAPKCPGTEVREEYKRGFGVPTLIAVHPENDPQGEGWEIAKAWAAATGGHRAGCLASSFVAEVKSDLMGEQTILCGMLQAGSIVCYEKMVADGIDPGYAGKLLQFGWETVTEALKFGGITHMMDRLSNPAKIKAFELSEELKDLMRPLYNKHMDDIISGHFSSTMMADWANDDKDLFGWRAETAETAFENYPTTDVKIAEQEYFDNGILMIAMVRAGVELAFEAMTASGIIDESAYYESLHELPLIANTVARKRLYEMNVVISDTAEYGNYLFANVAVPLLREKFMPKVGTDVIGKGLGAVSNQVDNATLIEVNSIIRNHPVEYIGEELRGYMKDMKRIAVGD

SEQ ID NO: 408 - protein, 494 aa, Vibrio harveyi
MANYFNTLNLREQLDQLGRCRFMDREEFASEADYLKGKKVVIVGCGAQGLNQGLNMRDSGLDVAYALRQAAIDEQRQSFKNAKDNGFEVGSYETLIPEADLVINLTPDKQHTNVVETVMPLMKEGAALGYSHGFNVVEEGMQIRKDLTVVMVAPKCPGTEVREEYKRGFGVPTLIAVHPENDPKGEGWDIAKAWAAGTGGHRAGCLESSFVAEVKSDLMGEQTILCGMLQAGSIVSYEKMVADGIDPSYAGKLLQYGWETITEALKFGGITHMMDRLSNPAKVKAFELSEELKELMRPLYNKHMDDIITGEFSSTMMADWANDDANLLGWREETGETAFENYPAGDIEISEQEYFDNGILLVAMVRAGVELAFEAMTASGIIDESAYYESLHELPLIANTVARKRLYEMNVVISDTAEYGNYLFANVATPLLREKFMPSVSTDVIGKGLGESSNQVDNATLIAVNEAIRNHPVEYIGEELRGYMTDMKNIAVGG

SEQ ID NO: 409 - protein, 494 aa, Vibrio cholerae
MANYFNTLNLREQLDQLGRCRFMAREEFATEADYLKGKKVVIVGCGAQGLNQGLNMRDSGLDVSYALRQAAIDEQRQSFKNAKNNGFNVGSYEQLIPTADLVINLTPDKQHTSVVNAVMPLMKQGAALGYSHGFNIVEEGMQIRKDITVVMVAPKCPGTEVREEYKRGFGVPTLIAVHPENDPQGEGWEIAKAWAAATGGHRAGCLASSFVAEVKSDLMGEQTILCGMLQAGSIVCYEKMVADGIDPGYAGKLLQFGWETITEALKFGGITHMMDRLSNPAKIKAFELSEELKDLMRPLYNKHMDDIISGHFSSTMMADWANDDKDLFGWRAETAETAFENYPTTDVKIAEQEYFDNGILMIAMVRAGVELAFEAMTASGIIDESAYYESLHELPLIANTVARKRLYEMNVVISDTAEYGNYLFANVAVPLLREKFMSKVGTDVIGKGLGVVSNQVDNATLIEVNSIIRNHPVEYIGEELRGYMKDMKRIAVGD

SEQ ID NO: 410 - protein, 494 aa, Vibrio caribbenthicus
MANYFNTLNLRQQLDQLGRCRFMDRSEFATEADYLKGKKVVIVGCGAQGLNQGLNMRDSGLDVAYALRQAAIDEQRQSYKNAKENGFEVDSYENLIPNADLVVNLTPDKQHTNVVETVMPLMKQGAALGYSHGFNVVEEGMQVRQDITVVMVAPKCPGTEVREEYKRGFGVPTLIAVHPENDPQGEGWDIAKAWAAATGGHRAGCLESSFVAEVKSDLMGEQTILCGMLQAGSIVSYEKMVAEGIDPGYAGKLLQYGWETITEALKFGGITHMMDRLSNPAKVKAFELSEQLKDLMRPLYNKHMDDIITGHFSSTMMADWANDDANLLGWREETGQTAFENYPESTQEITEQEYFDNGILMVAMVRAGVELAFEAMTASGIIDESAYYESLHELPLIANTIARKRLYEMNVVISDTAEYGNYLFANVATPLLREQFMPKVGTDVIGKGLAATSNHVDNARLIEVNDAIRNHPVEYIGEELRGYMTDMKRISVGG

SEQ ID NO: 411 - protein, 494 aa, Vibrio brasiliensis
MANYFNTLNLREQLDQLGRCRFMDRSEFATEADYLKGKKVVIVGCGAQGLNQGLNMRDSGLNVAYALRQAAIDEQRQSYKNAKENGFEVDSYEKLIPEADLVINLTPDKQHTNVVETVMPLMKEGAALGYSHGFNVVEEGMQIRKDLTVVMVAPKCPGTEVREEYKRGFGVPTLIAVHPENDPKGEGWDIAKAWAAGTGGHRAGCLESSFVAEVKSDLMGEQTILCGMLQAGSIVSYEKMIADGIDPSYAGKLLQYGWETITEALKFGGITHMMDRLSNPAKIKAFELSEELKDLMRPLYNKHMDDIITGEFSSTMMADWANDDANLLGWRAETGETAFENYPAGDVEIAEQEYFDNGILMVAMVRAGVELAFEAMTASGIIDESAYYESLHELPLIANTVARKRLYEMNVVISDTAEYGNYLFANVATPLLREKFMPSVGTDVIGKGLGETSNQVDNARLIEVNDTIRNHPVEYIGEELRGYMTDMKNIAVGG

SEQ ID NO: 412 - protein, 494 aa, Vibrio sinaloensis
MANYFNTLNLREQLDQLGRCRFMDRSEFATEADYLKGKKVVIVGCGAQGLNQGLNMRDSGLNVAYALRQAAIDEQRQSYKNAKENGFEVASYETLIPEADLVINLTPDKQHTNVVETVMPLMKEGAALGYSHGFNVVEEGMQIRKDLTVVMVAPKCPGTEVREEYKRGFGVPTLIAVHPENDPKGEGWDIAKAWAAGTGGHRAGCLESSFVAEVKSDLMGEQTILCGMLQAGSIVSYEKMVADGIDPSYAGKLLQYGWETITEALKFGGITHMMDRLSNPAKIKAFELSEELKELMRPLYNKHMDDIITGEFSSTMMADWANDDANLLGWREETGETAFENYPAGDIEISEQEYFDNGILLVAMVRAGVELAFEAMTASGIIDESAYYESLHELPLIANTVARKRLYEMNVVISDTAEYGNYLFANVATPLLREKFMPSVGTDVIGKGLGETSNQVDNATLIAVNDTIRNHPVEYIGEELRGYMTDMKNIAVGG

SEQ ID NO: 413 - protein, 494 aa, Photobacterium leiognathi
MANYFNTLNLRQQLDQLGRCRFMDRAEFATEADYLKGKKVVIVGCGAQGLNQGLNMRDSGLDVSYALRQAAIDEQRQSFKNAKENGFEVGSYEQLIPQADLVVNLTPDKQHTNVVETVMPLMKQGAALGYSHGFNIVEEGMQIRKDLTVVMVAPKCPGTEVREEYKRGFGVPTLIAVHPENDPQGDGLEIAKAWAAATGGHRAGVLESSFVAEVKSDLMGEQTILCGMLQAGSIVCYEKMIADGIAPEYAGKLLQYGWETITEALKFGGVSHMMDRLSNPAKVKAFDLSEELKDLMRPLYNKHMDDIISGHFSSTMMADWANDDADLLGWRGETAETQFENYPASDLQISEQEYFDNGILMVAMVRAGVELAFEAMTASGIIDESAYYESLHELPLIANTIARKRLYEMNVVISDTAEYGNYLFANVATPLLREQFMPKVATDVIGKGLGETSNFADNQKLIEVNEALRNHPVEVIGKELRGYMKDMKKIAVGG

SEQ ID NO: 414 - protein, 494 aa, Vibrio nigripulchritudo
MANYFNTLNLREQLDQLGRCRFMDRSEFATEADYLKGKKVVIVGCGAQGLNQGLNMRDSGLDVSYALRQAAIDEQRQSFKNAKDNGFEVGSYETLIPQADLVMNLTPDKQHTNVVETVMPLMKEGAALGYSHGFNVVEEGIQIRKDLTVVMVAPKCPGTEVREEYKRGFGVPTLIAVHPENDPKGEGWDIAKAWAAATGGHRAGCLESSFVAEVKSDLMGEQTILCGMLQAGSIVCYEKMIADGVDAGYAGKLLQYGWETVTEALKFGGITHMMDRLSNPAKIKAFELSEELKDLMRPLYNKHMDDIVTGHFSSTMMADWANDDVNLLGWRAETGETAFENYPETDVEISEQEYFDNGILMIAMVRAGVELAFEAMTASGIIDESAYYESLHELPLIANTIARKRLYEMNVVISDTAEYGNYLFANVATPLLREKFMPSVGTDVIGKGLGESSNQVDNARLIEVNEAIRNHPVEYIGEELRGYMTDMKRIAVGG

SEQ ID NO: 415 - protein, 494 aa, Vibrio ichthyoenteri
MANYFNTLNLREQLDQLGRCRFMDRSEFATEADFLKGKKVVIVGCGAQGLNQGLNMRDSGLDVAYALRQAAIDEQRQSYKNAKENGFEVASYEALIPQADLVVNLTPDKQHTNVVETVMPLMKQGAALGYSHGFNIVEEGMQIRSDLTVVMVAPKCPGTEVREEYKRGFGVPTLIAVHPENDPKGEGWDIAKAWAAATGGHRAGCLESSFVAEVKSDLMGEQTILCGMLQAGSIVCYEKMVAEGIDPAYAGKLLQFGWETVTEALKFGGITHMMDRLSNPAKIKAFELSEELKDLMRPLYNKHMDDIIEGEFSRTMMADWANDDVNLLGWRAETGETAFENYPESNIQISEQEYFDNGILMVAMVRAGVELAFEAMTASGIIDESAYYESLHELPLIANTIARKRLYEMNVVISDTAEYGNYLFANVATPLLREKFMPSVNTDVIGKGLGETSNQVDNQQLIDVNDAIRNHPVEYIGEELRGYMTDMKHIAVGG

SEQ ID NO: 416 - protein, 494 aa, Vibrio scophthalmi
MANYFNTLNLREQLDQLGRCRFMDRSEFATEADFLKGKKVVIVGCGAQGLNQGLNMRDSGLDVAYALRQAAIDEQRQSYKNAKENGFEVASYETLIPQADLVVNLTPDKQHTNVVETVMPLMKQGAALGYSHGFNIVEEGMQIRDDLTVVMVAPKCPGTEVREEYKRGFGVPTLIAVHPENDPKGEGWDIAKAWAAATGGHRAGCLESSFVAEVKSDLMGEQTILCGMLQAGSIVCYEKMVAEGIDPAYAGKLLQFGWETVTEALKFGGITHMMDRLSNPAKIKAFELSEELKDLMRPLYNKHMDDIIEGEFSRTMMADWANDDVNLLGWRAETGETAFENYPESNIQISEQEYFDNGILMVAMVRAGVELAFEAMTASGIIDESAYYESLHELPLIANTVARKRLYEMNVVISDTAEYGNYLFANVATPLLREKFMPSVGIDVIGKGLGEESNQVDNQQLIEVNDAIRNHPVEYIGEELRGYMTDMKHIAVGG

SEQ ID NO: 417 - protein, 494 aa, Vibrio rotiferianus
MANYFNTLNLREQLDQLGRCRFMDREEFASEADYLKGKKVVIVGCGAQGLNQGLNMRDSGLDVAYALRQAAIDEQRQSFKNAKDNGFEVGSYETLIPQADLVVNLTPDKQHTNVVETVMPLMKEGAALGYSHGFNVVEEGMQIRKDLTVVMVAPKCPGTEVREEYKRGFGVPTLIAVHPENDPKGEGWDIAKAWAAATGGHRAGCLESSFVAEVKSDLMGEQTILCGMLQAGSIVCYEKMIADGIDPGYAGKLLQYGWETITEALKFGGITHMMDRLTNPAKVKAFELSEELKELMRPLYNKHMDDIITGHFSSTMMADWANDDVNLLGWRAETGETAFENYPETDVEISEQEYFDNGILMVAMVRAGVELAFEAMTASGIIDESAYYESLHELPLIANTIARKRLYEMNVVISDTAEYGNYLFANVATPLLREKFMPAVNTDVIGKGQGETSNQVDNATLIAVNDAIRNHPVEYIGEELRGYMTDMKNIAVGG

SEQ ID NO: 418 - protein, 493 aa, Haemophilus haemolyticus
MANYFNTLNLREKLDQLGRCRFMDRSEFADGCNYLKGKKIVIVGCGAQGLNQGLNMRDSGLDISYALRPEAIAEKRASFQRATENGFKVGTYQELIPTADLVINLTPDKQHSKVVADVMPLMKKDSAFGYSHGFNIVEVGEQIREDITVVMTAPKCPGTEVREEYKRGFGVPTLIAVHPANDPRGEGMAIAKAWAAATGGDRAGVLESSFVAEVKSDLMGEQTILCGMLQAGSIVCYDKLVADGKDPAYAGKLIQYGWETITEALKQGGITLMMDRLSNSAKLRAFELAEQIKESLGFLYYKHMDDIISGHFSATMMADWANGDKDLFAWREATGKTAFENAPKADGIKISEQEYFDNGVLMVAMVKAGVELAFDAMVASGIYEESAYYESLHELPLIANTIARKRLYEMNVVISDTAEYGNYLFSNVATPILAKEIIPTLQKGDLGEPTPAVAIDNITLRDVNDAIRNHPVELIGQELRGYMTDMKRIAVAG

SEQ ID NO: 419 - protein, 493 aa, Actinobacillus pleuropneumoniae
MANYFNTLNLRQKLDQLGRCRFMDRNEFADGCNFLKGKKIVIVGCGAQGLNQGLNMRDSGLDISYALRAEAIAEKRASFTRATENGFKVGTYQELIPTADLVINLTPDKQHSKVVADVVPLMKQGSAFGYSHGFNIVEEGEQIRKDITVVMTAPKCPGTEVREEYKRGFGVPTLIAVHPENDPKGEGMAIAKAWASATGGDRAGVLESSFVAEVKSDLMGEQTILCGMLQAGSIVCYDKLVADGKDPAYASKLIQYGWETITEALKQGGITLMMDRLSNAAKIRAFELSEEIKVQLNDLYLKHMDDIISGEFSSTMMADWANGDVNLFKWREETGKTAFENSPKADGIKISEQEYFDNGVVMVAMVKAGVEMAFDAMVASGIYEESAYYESLHELPLIANTIARKRLYEMNVVISDTAEYGNYLFSHVATPILAEKLIPMLQKGDLGEPTPAAEIDNVYLRDINDAIRNHPVELIGQELRGYMTDMKRISSQG

SEQ ID NO: 420 - protein, 493 aa, Shewanella loihica
MANYFNSLNLRQQLEQLGQCRFMDRSEFSQGCDYIKGWNIVILGCGAQGLNQGLNMRDSGLNISFALREQAIAEQRPSYQKATGNGFRVGTFEELIPDADLVLNLTPDKQHTDAVNAVMPLMKQGAVLSYSHGFNIVEEGMQVRPDITVIMVAPKCPGTEVREEYKRGFGVPTLIAVHPENDPKGDGLEVAKAYASATGGDRAGVLHSSFIAEVKSDLMGEQTILCGMLQTGAILGYEKMVADGIEPGYAAKLIQQGWETTTEALKHGGITHMMDRLSNPAKIKAFEMAEELKAILQPLFEKHMDDIISGEFSKTMMEDWANDDANLLKWRAETNETGFENAPACDEAIDEQTYFDKGIFLVAMIKAGVELAFDTMVSAGIVEESAYYESLHETPLIANTIARKRLYEMNVVISDTAEYGCYLFNHAAVPLLRDYVNQMSPEYLGGGLKDSGNGVDNLRLIEVNDAIRHTAVEYIGAELRGYMTEMKRIVEEA

SEQ ID NO: 421 - protein, 493 aa, Aeromonas salmonicida
MANYFNTLNLRQQLAQLGKCRFMQRAEFADGCDVLKGKKVVIVGCGAQGLNQGLNMRDSGLDISYTLRKAAITEKRASWQKATDNGFAVGTYEELIPTADLVLNLTPDKQHSDVVKTVMPLMKQGAALGYSHGFNVVEEGQQIRADITVVMVAPKCPGTEVREEYKRGFGVPTLLAVHPENDPKGVGMAIAKAWASATGGDRAGVLESSFVAEVKSDLMGEQTILCGMLQAGSLLCYDKLVAEGTDPAYAGKLIQFGWETITEALKQGGISLMMDRLSNPAKLRAFELSEQLRTLMRPLFEKHMDDIIAGEFSRGMMADWAEDDAKLFGWREETGKSAFENALAFAGKIAEQEYFDNGVVMVAMVKAGVELAFETMVASGIYEESAYYESLHELPLIANTVARKRLYEMNVVISDTAEYGNYLFANAAVPLLREHFMPTLKAGDLGASKAEGQNVDNLALLAANEATRNHPIEKIGQVLRGYMKDMKRIAVGG

SEQ ID NO: 422 - protein, 493 aa, Actinobacillus succinogenes
MSNYFNTLNLREKLDQLGRCRFMDRSEFSDGCNFLKGKKIVIVGCGAQGLNQGLNMRDSGLDISYALRKAAIEEKRPSFQRATENGFKVGTYEELIPTADLVINLTPDKQHSKVVSDVMPLMKQGAAFGYSHGFNIVEVGEQIREDITVVMSAPKCPGTEVREEYKRGFGVPTLIAVHPANDPKGEGMAIAKAWASATGGDRAGVLESSFVAEVKSDLMGEQTILCGMLQAGSIVCYDKLIADGKDPAYAGKLIQYGWETITEALKQGGITLMMDRLSNAAKLRAFELSEQIKEKLGFLYLKHMDDIISGEFSRVMMEDWANGDKDLLAWREATGKTAFENAPKADGIKISEQEYFDNGVLMVAMVKAGVEMAFDAMVASGIYEESAYYESLHELPLIANTIARKRLYEMNVVISDTAEYGNYLFSNVATPILAKEIIPALQKGDLGEPTPAVDIDNVTLRDVNDEIRNHPVELIGLELRGYMTDMKRISSQG

SEQ ID NO: 423 - protein, 493 aa, Shewanella sediminis
MANYFNSLNLRQQLEQLAQCRFMDRNEFSEGCDFIKGWNIVILGCGAQGLNQGLNMRDSGLNIAYALRAQAIEEKRASYQKATGNGFRVGTIEELIPDADLVLNLTPDKQHTDAVNTVMPLMKQGATLSYSHGFNIVEEGMQVRDDITVIMVAPKCPGTEVREEYKRGFGVPTLVAVHPENDPKGNGFDIAKAYASATGGDRAGVLHSSFIAEVKSDLMGEQTILCGMLQTGAILGYEKMVADGVEPGYAAKLIQQGWETTTEALKHGGITNMMDRLSNPAKIKAFEMAEELKGILAPLFEKHMDDIIGGEFSKTMMEDWANDDANLLKWRKETGETAFENAPQSDEDIDEQAYFDKGIFLVAMIKAGVELAFDTMVASGIVEESAYYESLHETPLIANTIARKRLYEMNIVISDTAEYGCYLFNHAAVPMLRDYVNAMSPEFLGAGLGDSGNGVDNQRLIEVNAAIRGTGVEKIGAELRGYMTEMQRIVEEK

SEQ ID NO: 424 - protein, 493 aa, Shewanella pealeana
MANYFNSLNLRQQLEQLAQCRFMDRSEFSEGCNFIKGWNIVILGCGAQGLNQGLNMRDSGLNISFALREQAISEKRDSYQKATGNGFRVGTIEELIPDADLVLNLTPDKQHTNAVNTVMPLMKQGATLSYSHGFNIVEEGMQVRPDITVIMVAPKCPGTEVREEYKRGFGVPTLIAVHPENDPKGDGFDIAKAYASATGGDRAGVLHSSFIAEVKSDLMGEQTILCGMLQTGAILGYEKLVADGVEPGYAAKLIQQGWETTTEALKHGGITHMMDRLSNPAKIKAFDMAEELKVILKPLFEKHMDDIIGGEFSKTMMADWANDDANLLKWRSETNDTGFENAPGCEEHIDEQAYFDKGIFLVAMIKAGVELAFDTMVAAGIIEESAYYESLHETPLIANTIARKRLYEMNVVISDTAEYGCYLFNHAALPLLKDYVANMSAEYLGGGLQDASNGVDNVRLIEVNAAIRGTAVEEIGAELRGYMTEMKRIVEEK

SEQ ID NO: 425 - protein, 493 aa, Shewanella halifaxensis
MANYFNSLNLRQQLQQLAQCRFMDRSEFSEGCNFIKGWNIVILGCGAQGLNQGLNMRDSGLNISFALREQAITDKRDSYQKATGNGFRVGTIEELIPDADLVLNLTPDKQHTNAVNTVMPLMKQGATLSYSHGFNIVEEGMQVRPDITVIMVAPKCPGTEVREEYKRGFGVPTLIAVHPENDHKGEGFDIAKAYASATGGDRAGVLHSSFIAEVKSDLMGEQTILCGMLQTGAILGYEKMVADGIEPGYAAKLIQQGWETTTEALKHGGITHMMDRLSNPAKIKAFDMAEELKVILKPLFEKHMDDIIGGEFSKTMMADWANDDANLLKWRSETNDTGFENAPTCDEYIDEQAYFDKGIFLVAMIKAGVELAFDTMVAAGIIEESAYYESLHETPLIANTIARKRLYEMNVVISDTAEYGCYLFNHAALPLLKDYVANMSAEYLGGGLQDTSNGVDNQRLIEVNAAIRYTAVEEIGAELRGYMTEMKRIVEES

SEQ ID NO: 426 - protein, 493 aa, Shewanella woodyi
MANYFNSLNLRQQLEQLAQCRFMDRSEFSEGCDFIKGWNIVILGCGAQGLNQGLNMRDSGLNIAYALRAEAIEEKRASYQKATGNGFRVGTIEELIPEADLVLNLTPDKQHTDAVTRVMPLMKQGSTLSYSHGFNIVEEGMQVREDITVIMVAPKCPGTEVREEYKRGFGVPTLIAVHPENDPKGQGFDIAKAYASATGGDRAGVLHSSFIAEVKSDLMGEQTILCGMLQTGAILGYEKMVADGVEPGYAAKLIQQGWETTTEALKHGGITNMMDRLSNPAKIKAFEMAEELKGILAPLFEKHMDDIIGGEFSKTMMADWANDDANLLKWRKETGETAFENAPQSDESIDEQTYFDKGIFLVAMIKAGVELAFDTMVSAGIIEESAYYESLHETPLIANTIARKRLYEMNVVISDTAEYGCYLFNHAAVPMLREYVQNMSPEFLGRGLSDGSNGVDNQRLIEVNAAIRGTGVEKIGAELRGYMTAMQRIVEEK

SEQ ID NO: 427 - protein, 493 aa, Haemophilus somnus
MGNYFNTLNLRQQLDQLGRCRFMDREEFADEVNFLKGKKIVIIGCGAQGLNQGLNMRDSGLDIAYALRPEAIEEKRASFQRASENGFVVGTYQQLIPTADLVINLTPDKQHSKVVADVMPLIKQGAALGYSHGLNIVELGEKIRQDITVVMVAPKCPGTEVREEFKRGFGVPTLIAVHPENDPKGEGLAIAKAWAAATGGHRAGVLESSFVAEVKSDLMGEQTILCGMLQAGSLVCYDKLIADGKDPAYAGKLIQYGWETITEALKQGGITLMMDRLSNSAKLRAFSLSEQIKEKLDFLFKKHMDDIISGEFSRVMMEDWANGDANLLEWREQTGKTAFENAPKGENIKISEQEYFDHGVLMVAMVKAGVELAFDTMVETGIYEESAYYESLHELPLIANTIARKRLYEMNVVISDTAEYGNYLFANVAAPILAKEIIPTLKRGDLGESTPATEIDNILLRDVNDAIRQHPIELIGQELRGYMTDMKRISSQE

SEQ ID NO: 428 - protein, 493 aa, Shewanella piezotolerans
MANYFNSLNLRQQLEQLAQCRFMDRSEFSEGCNHIKGWNIVILGCGAQGLNQGLNMRDSGLNIAFALREQAISEKRESYQKATGNGFRVGTIEELIPDADLVLNLTPDKQHTNAVNTVMPLMKQGATLSYSHGFNIVEEGMQVRPDITVIMVAPKCPGTEVREEYKRGFGVPTLIAVHPENDPKGEGFDIAKAYASATGGDRAGVLHSSFIAEVKSDLMGEQTILCGMLQTGAILGYEKMVADGVEPGYAAKLIQQGWETTTEALKHGGITHMMDRLSNPAKIKAFEMAEELKTILRPLFEKHMDDIIGGEFSKTMMEDWANDDANLLKWRSETNETAFENAPQTDEQIDEQTYFDKGIFLVAMIKAGVELAFDTMVAAGIVEESAYYESLHETPLIANTIARKRLYEMNVVISDTAEYGCYLFNHAAVPMLRDYVENMSSEFLGGGLKDSGNGVDNVRLIEVNEEIRGTAVEFIGAELRGYMTEMKRIVEEG

SEQ ID NO: 429 - protein, 493 aa, Haemophilus parasuis
MANYFNTLNLREKLDQLGRCRFMDRSEFADGCNFLKGKKIVIVGCGAQGLNQGLNMRDSGLDIAYALRAEAIAEKRASFTRATENGFKVGTYQELIPTADLVINLTPDKQHSKVVADVMPLMKQGAAFGYSHGFNIVEQGEQIRKDITVVMTAPKCPGTEVREEYKRGFGVPTLIAVHPENDPKGEGMAIAKAWASATGGDRAGVLESSFVAEVKSDLMGEQTILCGMLQAGSIVCYDKLVADGKDPAYASKLIQYGWETITEALKQGGITLMMDRLSNSAKIRAFELAEEIKVQLNDLYLKHMDDIISGEFSSTMMADWANGDANLFKWREETGKTAFENSPKADGIKISEQEYFDNGVVMVAMVKAGVEMAFDAMVASGIYEESAYYESLHELPLIANTIARKRLYEMNVVISDTAEYGNYLFSHVATPILAEKLIPMLQKGDLGEPTPTVEIDNVYLRDINDAIRNHPVELIGQELRGYMTDMKRIAVGD

SEQ ID NO: 430 - protein, 493 aa, Pedobacter heparinus
MSNYFNTLPLREQLNQLGVCDFMDSAEFLDGVNVLKGKKLVIVGCGAQGLNQGLNLRDSGLDVSYALRKEAIEGKRDSWKNATENNFTVGTYEELIPNADVVINLTPDKQHTAVVNAVMPLMKKGATLLYSHGFNIVEEGMQIRKDITVIMVAPKCPGSEVRAEYVRGFGVPTLIAVHPENDPEGKGLAQAKAYCVGTGGHRAGVLRSSFVAEVKSDLMGEQTILCGLLQTGSILSFDKMIEKGIDAGYASKLVQYGVEVITEALKHGGVTGMLDRLSNPAKIKAFEISEELKNIMRPLFQKHQDDIMSGEFSSTMMADWANGDKNLLKWRAETGETAFEKTPAADVKIAEQEYFDNYTLMVAFVRAGVELAFETMVQAGIKPESAYYESLHETPLIANTIARKKLFEMNRVISDTAEYGCYLFDQACKPLLADFMKKVDTDLVGKNFNEGKDGGVDNRTLIAVNEALRTHEVEVIGTKLRKAMTAMKSIKTA

SEQ ID NO: 431 - protein, 493 aa, Shewanella violacea
MANYFNSLNLRQQLEQLAQCRFMDRNEFSQGCDFIKGWNIVILGCGAQGLNQGLNMRDSGLNIAYALRAEAIQEKRASYQKATGNGFRVGTIEELIPDADLVLNLTPDKQHTNAVSTIMPLMKQGATLSYSHGFNIVEEGMQVREDITVIMVAPKCPGTEVREEYKRGFGVPTLIAVHPENDPKAQGFDIAKAYASATGGDRAGVLHSSFIAEVKSDLMGEQTILCGMLQTGAILGYEKMVSDGVEPGYAAKLIQQGWETTTEALKHGGITNMMDRLSNPAKIQAFEMAEELKGILAPLFEKHMDDIIGGEFSRAMMVDWAKDDANLLKWRAETGETAFENAPVSDEDIDEQTYFDKGIFLVAMIKAGVELAFDTMTSAGIVAESAYYESLHETPLIANTIARKRLYEMNVVISDTAEYGCYLFNHAAVPMLRDYVNAMSPEFLGRGLSDSSNGVDNQRLIQVNAAIRGTGVEKVGAELRGHMTAMQQIVEEK

SEQ ID NO: 432 - protein, 493 aa, Pedobacter saltans
MANYFNTLPLREQLNQLGVCEFMENSEFADGINALKGKKIVIVGAGAQGLNQGLNLRDSGLDISYALRKEAIEGKRDSWKNATENNFKVGTYDELIPTADVVVNLTPDKQHTAVVSAVMPLMKQGSTLLYSHGFNIVEEGMQVRKDITVIMVAPKCPGSEVRAEYLRGFGVPTLIAVHPENDPEGKGLAQAKAYCVGTGGHRAGVLRSSFVAEVKSDLMGEQTILCGLLQTGSILSFDKMIEKGIDAGYASKLVQYGVEVITEALKHGGVSGMMDRLSNPAKIKAFNISEELKDIMRPLFQKHQDDIMSGEFSRVMMEDWANGDANLLKWRAETGETAFEKTPAGDAKIGEQEYFDNYLLMVAFVRAGVELAFETMVEAGIKAESAYYESLHETPLIANTIARKKLFEMNRVISDTAEYGCYLFDQACKPLLADFMKTVDTDLVGKNFNEGKDGSVDNAELVAVNEVLRNHPVEIVGRKLRGAMTAMKAIKTA

SEQ ID NO: 433 - protein, 493 aa, Sphingobacterium sp.
MANYFNTLPLREKLNQLGVAEFMDIREFTDGVSALKGKKIVIVGCGAQGLNQGLNLRDSGLDVSYALRKEAIEQKRDSWKNATDNNFTVGTYEELIPTADLVSNLTPDKQHSSVIDAIMPLMKEGATLSYSHGFNIVEEGKQIRKDITVIMVAPKCPGSEVRAEYLRGFGVPTLIAVHPENDPQGKGLAEAKAYCVGTGGHKAGVLRSSFVAEVKSDLMGEQTILCGLLQTGSILSFDKMVEKGIEPGYASKLVQYGVEVITEALKQGGITAMMDRLSNVAKIKAFEVSEELKNIMRPLFQKHQDDIMSGEFSRTMMEDWANGDKNLLAWRAATGETAFEKTPAGDVKIGEQEYFDHAVFMVSYIRAGVELAFETMVEAGIKPESAYYESLHETPLIANTIARKKLFEMNRVISDTAEYGCYLFDHACKPLLADFMKTVDTDIIGKNYNDGKDGAVDNQELIAVNEAIRNHPVEKVGAVLRKAMTAMKAIKTV

SEQ ID NO: 434 - protein, 493 aa, Aeromonas veronii
MANYFNTLNLRQQLAQLGKCRFMQREEFADGCNVLKGKKVVIVGCGAQGLNQGLNMRDSGLDISYALRKAAITEKRASWQKATDNGFAVGTYEELIPTADLVLNLTPDKQHSDVVKTVMPLMKQGAALGYSHGFNVVEEGQQIRSDITVVMVAPKCPGTEVREEYKRGFGVPTLIAVHPENDPKGEGMAIAKAWASATGGDRAGVLESSFVAEVKSDLMGEQTILCGMLQAGSLLCYDKLVAEGTDPAYAGKLIQFGWETITEALKQGGISLMMDRLSNPAKLRAFELSEQLKTLMRPLFEKHMDDIIAGEFSRGMMADWAEDDVKLFTWREETGKSAFENAPAFAGKIAEQEYFDNGVVMVAMVKAGVELAFETMVASGIYEESAYYESLHELPLIANTVARKRLYEMNVVISDTAEYGNYLFANAAVPLLREHFMPTLKAGDLGASKAEGQSVDNLALLAANEATRNHPIEKIGQVLRGYMKDMKRIAVGG

SEQ ID NO: 435 - protein, 493 aa, Haemophilus parainfluenzae
MANYFNTLNLREKLDQLGRCRFMDRSEFADGCNYLKGKKIVIVGCGAQGLNQGLNMRDSGLDISYALRPEAIAEKRASFQRATENGFKVGTYQELIPTADLVINLTPDKQHSKVVADVMPLMKKDSAFGYSHGFNIVEVGEQIREDITVVMSAPKCPGTEVREEYKRGFGVPTLIAVHPANDPRGEGMAIAKAWAAATGGDRAGVLESSFVAEVKSDLMGEQTILCGMLQAGSIVCYDKLVADGKDPAYAGKLIQYGWETITEALKQGGITLMMDRLSNSAKLRAFELAEQIKESLGFLYYKHMDDIISGHFSATMMADWANGDKDLFAWREATGKTAFENAPKADGIKISEQEYFDNGVLMVAMVKAGVELAFDAMVASGIYEESAYYESLHELPLIANTIARKRLYEMNVVISDTAEYGNYLFSNVATPILAKEIIPTLQKGDLGEPTPAVAIDNITLRDVNDAIRNHPVELIGQELRGYMTDMKRIAVAG

SEQ ID NO: 436 - protein, 493 aa, Mannheimia succiniciproducens
MSNYFNTLNLRQKLDQLGRCRFMERSEFADGCNFLKGKKIVIVGCGAQGLNQGLNMRDSGLDISYALRPEAITEKRASFQRATENGFKVGTYQELIPTADLVVNLTPDKQHSKVVADVMPLMKQGASFGYSHGFNIVEVGEQIREDITVVMVAPKCPGTEVREEYKRGFGVPTLIAVHPANDPKGEGMAIAKAWASATGGDRAGVLESSFVAEVKSDLMGEQTILCGMLQAGSIVCYDKLVADGKDPAYAGKLIQYGWETITEALKQGGITLMMDRLSNSAKIRAFELAEEIKEHLNFLYLKHMDDIISGEFSATMMADWANGDKDLFAWREATGKTAFENAPKADGIKISEQEYFDNGVVMVAMVKAGVEMAFDAMVASGIYEESAYYESLHELPLIANTIARKRLYEMNVVISDTAEYGNYLFSNVATPILAKEIVSQLKRGDLGEPTPAAEIDNVYLRDINDTIRNHPVELIGQELRGYMTDMKRISSQG

SEQ ID NO: 437 - protein, 493 aa, Colwellia psychrerythraea
MSNYFNTLSLREKLGQLGKCRFMKREEFNDGCNFIKDWNIVIVGCGAQGLNQGLNMRDSGLNISYTLRDAAISEKRQSWQWATENGFTVGSYAELIPQADLVLNLTPDKQHTSAVTAVMPLMKQGATLAYSHGFNIVEEGMQIRSDITVVMVAPKCPGTEVREEYKRGFGVPTLIAVHPENDPQGNGLAIAKAYASATGGDRAGVLESSFIAEVKSDLMGEQTILCGMLQTAAVLGHKQLIAQGMDAAYARKLLQYGLETTTEGLKHGGITNMMDRLSNPAKILAFDMAEELKVILRPLFQKHMDDIIEGRFSATMMADWANDDVNLLTWRAETAETSFEKSPECDTEISEQEYYDKGIFVVAMIKAGVELAFDAMVDSGIINASAYYESLHETPLIANCIARNMLHEMNVVISDTAEYGNYLFTHAAVPLLADYTASLTLEQLGEGLKESSNNVDNARLIEVNEAIRSHGVEVIGKELRGYMTDMKKIASAK

SEQ ID NO: 438 - protein, 493 aa, Haemophilus somnus
MGNYFNTLNLRQQLDQLGRCRFMEREEFADGVNFLKGKKIVIIGCGAQGLNQGLNMRDSGLDIAYALRPEAIEEKRASFQRASENGFVVGAYQQLIPTADLVINLTPDKQHSKVVADVMPLIKQGAALGYSHGLNIVEVGEKIRQDITVVMVAPKCPGTEVREEFKRGFGVPTLIAVHPENDPKGEGLAIAKAWAAATGGHRAGVLESSFVAEVKSDLMGEQTILCGMLQAGSLVCYDKLIADGKDPAYAGKLIQYGWETITEALKQGGITLMMDRLSNSAKLRAFSLSEQIKEKLDFLFKKHMDDIISGEFSRVMMEDWANGDANLLKWREQTGKTAFENAPKGENIKISEQEYFDHGVLMVAMVKAGVELAFDTMVETGIYEESAYYESLHELPLIANTIARKRLYEMNVVISDTAEYGNYLFANVAAPILAKEIIPTLKRGDLGESTPATEIDNILLRDVNDAIRQHPIELIGQELRGYMTDMKRISSQG

SEQ ID NO: 439 - protein, 493 aa, Shewanella frigidimarina
MANYFNSLNLRQQLAQLAQCRFMDRTEFSDGCQYIKDWNIVILGCGAQGLNQGLNMRDSGLNISFALRPQAIAEKRASWQKATDNGFKVGTFEELIPAADLVLNLTPDKQHTNVVNAVMPLMKQGATLSYSHGFNIVEEGMQVRPDITVVMVAPKCPATEVREEYKRGFGVPTLIAVHPENDPNSDGLAIAKAYASATGGDRAGVLMSSFVAEVKSDLMGEQTILCGMLQTGAILGYEKMVADGVEPGYAGKLIQQGWETVTEALKHGGITNMMDRLSNPAKIKAFDMAEELKVILKPLFEKHMDDIISGEFSRTMMEDWANDDTNLLRWRAETNETAFENAPVSSEHIDEQTYFDKGIFLVAMIKAGVELAFDTMVAAGIVEESAYYESLHETPLIANTIARKRLYEMNVVISDTAEYGCYLFNHAAVPMLRDYVNAMSSEYLGAGLKDQATGVDNLRLIDVNDQIRNTEVEFIGAELRGYMTDMKSIVEAS

SEQ ID NO: 440 - protein, 493 aa, Aeromonas hydrophila
MANYFNTLNLRQQLAQLGKCRFMQREEFADGCNVLKGKKVVIVGCGAQGLNQGLNMRDSGLDISYALRKAAITEKRASWQKATDNGFAVGTYEELIPTADLVLNLTPDKQHSDVVKTVMPLMKQGAALGYSHGFNVVEEGQQIRADITVVMVAPKCPGTEVREEYKRGFGVPTLIAVHPENDPKGEGMAIAKAWASATGGDRAGVLESSFVAEVKSDLMGEQTILCGMLQAGSLLCYDKLVAEGTDPAYAGKLIQFGWETITEALKQGGISLMMDRLSNPAKLRAFELSEQLKTLMRPLFEKHMDDIIAGEFSRGMMADWAEDDAKLFGWREETGKSAFENAPAFAGKIAEQEYFDNGVVMVAMVKAGVELAFETMVASGIYEESAYYESLHELPLIANTVARKRLYEMNVVISDTAEYGNYLFANAAVPLLREHFMPTLKAGDLGASKAEGQSVDNLALLAANEATRNHPIEKIGQVLRGYMKDMKRIAVGG

SEQ ID NO: 441 - protein, 493 aa, Shewanella amazonensis
MANYFNSLNLRQQLAQLSQCRFMDRSEFENGCDYIKGWNIVILGCGAQGLNQGLNMRDSGLNISYALRAEAIAEKRASWKKATDNGFTVGTFEELIPQADLVLNLTPDKQHSNVVNTVMPLMKQGATLSYSHGFNIVEEGMQVRPDITVIMVAPKCPGTEVREEYKRGFGVPTLIAVHPENDPRGDGLEIAKAYASATGGDRAGVLHSSFIAEVKSDLMGEQTILCGMLQTSAILGYEKMVADGVEPGYAAKLIQQGLETITEALKQGGITNMMDRLSNPAKIKAFDMAEELKGILAPLFEKHMDDIISGEFSRTMMADWANDDANLLRWRAETNETAFENAPSSNEHIDEQTYFDKGIFLVAMIKAGVELAFDTMVDAGIIEESAYYESLHETPLIANTIARKRLYEMNVVISDTAEYGCYLFNHAAVPLLRDYVKSMSAEYLGGGLKDSSNAVDNVRLIEVNQAIRNTAVEFIGEELRGYMKDMKRISAAQ

SEQ ID NO: 442 - protein, 493 aa, Psychromonas ingrahamii; identical to SEQ ID NO: 90

SEQ ID NO: 443 - protein, 493 aa, Actinobacillus pleuropneumoniae
MANYFNTLNLRQKLDQLGRCRFMDRNEFADGCNFLKGKKIVIVGCGAQGLNQGLNMRDSGLDISYALRAEAIAEKRASFTRATENGFKVGTYQELIPTADLVINLTPDKQHSKVVADVVPLMKQGSAFGYSHGFNIVEEGEQIRKDITVVMTAPKCPGTEVREEYKRGFGVPTLIAVHPENDPKGEGMAIAKAWASATGGDRAGVLKSSFVAEVKSDLMGEQTILCGMLQAGSIVCYDKLVADGKDPAYASKLIQYGWETITEALKQGGITLMMDRLSNAAKIRAFELSEEIKVQLNDLYLKHMDDIISGEFSSTMMADWANGDVNLFKWREETGKTAFENSPKADGIKISEQEYFDNGVVMVAMVKAGVEMAFDAMVASGIYEESAYYESLHELPLIANTIARKRLYEMNVVISDTAEYGNYLFSHVATPILAEKLIPMLQKGDLGEPTPAAEIDNVYLRDINDAIRNHPVELIGQELRGYMTDMKRISSQG

SEQ ID NO: 444 - protein, 493 aa, Unknown
  marine gamma proteobacterium
MANYFNTLSLRDKLTQLGKCRFMDRSEFTDGCDFIKDWNIVIIGCGAQGLNQGLNMRDSGLNISYALRAQAIAEKRQSFVWASENGFTVGTAEELVPAADLVLNLTPDKQHTAAVTAVMPLMKQGATLAYSHGFNIVEEGMQIRPDLTVVMVAPKCPGTEVREEYKRGFGVPTLIAVHPENDPQGNGHAIAKAYASATGGDRAGVLESSFIAEVKSDLMGEQTILCGMLQTGAVLGHQQLINLGVDAAYARKLIQYGWETVTEGLKHGGITNMMDRLSNPAKIKAFDMSEELKVTLRPLFEKHMDDIIEGEFSHTMMIDWANDDANLLKWRAETADSSFEQAADCDIEITEQEFYDKGIYLVAMIKAGVELAFETMVASGIIEESAYYESLHETPLIANCIARNKLYEMNVVISDTAEYGNYLFTHAAVPLLQAHASSLTLEELGGGLADSSNAVDNLRLIEVNDAIRDHDVEIIGHELRGYMTDMKRIVEAG

SEQ ID NO: 445 - protein, 493 aa, Pedobacter sp.
MSNYFNTLPLREKLNQLGVCDFMESSEFLDGVNALKGKKLVIVGCGAQGLNQGLNLRDSGLDISYALRQEAIDGKRDSWKNATENNFNVGTYEQLIPSADVVINLTPDKQHTAVVNAVMPLMKQGATLLYSHGFNIVEEGMQIRKDITVIMVAPKCPGSEVRAEYVRGFGVPTLIAVHPENDPEGKGLEQAKAYCVGTGGHRAGVLKSSFVAEVKSDLMGEQTILCGLLQTGSILSFDKMIEKGIDAGYASKLVQYGVEVITEALKQGGITAMMDRLSNVAKIKAFEVSEELKTIMRPLFQKHQDDIMSGEFSRIMMEDWAAGDKNLLAWRAATGETAFEKTPAGNVTIGEQEYFDNNLLMVAFVRAGVELAFETMVEAGIKPESAYYESLHETPLIANTIARKKLFEMNRVISDTAEYGCYLFDHACKPLLADFMTRVDTDLVGKNFNEGKDGAVDNRALIAVNEVIRTHQVELVGAELRKAMTAMKSIKTA

SEQ ID NO: 446 - protein, 493 aa, Shewanella benthica
MANYFNSLNLRQQLEQLAQCRFMDSNEFSQGCDFIKGWNIVILGCGAQGLNQGLNMRDSGLNIAYALRAEAIEEKRASYQKATGNGFRVGTIEELIPDADLVLNLTPDKQHTNAVTSVMPLMKQGATLSYSHGFNIVEEGMQVREDITVIMVAPKCPGTEVREEYKRGFGVPTLIAVHPENDPKSQGFDIAKAYASAIGGDRAGVLHSSFIAEVKSDLMGEQTILCGMLQTGAILGYEKMVSDGVEPGYAAKLIQQGWETTTEALKHGGITNMMDRLSNPAKIKAFDMAEELKVMLAPLFEKHMDDIIAGEFSRTMMLDWANDDANLLKWRAATGETAFENAPVSDEDIDEQTYFDKGIFLVAMIKAGVELAFDTMTSAGIVAESAYYESLHETPLIANTIARKRLYEMNVVISDTAEYGCYLFNHAAVPMLRDFVNAMSPEYLGRGLSDSSNGVDNQRLIEVNAAIRGTGVEKIGAELRGHMTAMQQIVEEK

SEQ ID NO: 447 - protein, 493 aa, Haemophilus parasuis
MANYFNTLNLREKLDQLGRCRFMDRSEFADGCNFLKGKKIVIVGCGAQGLNQGLNMRDSGLDIAYALRAEAIAEKRASFTRATENGFKVGTYQELIPTADLVINLTPDKQHSKVVADVMPLMKQGAAFGYSHGFNIVEQGEQIRKDITVVMTAPKCPGTEVREEYKRGFGVPTLIAVHPENDPKGEGMAIAKAWASATGGDRAGVLESSFVAEVKSDLMGEQTILCGMLQAGSIVCYDKLVADGKDPAYASKLIQYGWETITEALKQGGITLMMDRLSNSAKIRAFELAEEIKLQLNDLYLKHMDDIISGEFSSTMMADWANGDANLLKWREETGKTAFENSPKADGIKISEQEYFDNGVVMVAMVKAGVEMSFDAMVASGIYEESAYYESLHELPLIANTIARKRLYEMNVVISDTAEYGNYLFSHVATPILAEKLIPMLQKGDLGEPTPTVEIDNVYLRDINDAIRNHPVELIGQELRGYMTDMKRIAVGD

SEQ ID NO: 448 - protein, 493 aa, Sphingobacterium spiritivorum
MANYFNTLPLREQLNQLGVAEFMDSTEFTDGVEALKGKKLVIVGCGAQGLNQGLNLRDSGLDVSYTLRKEAIEQKRDSWKNATDNNFTVGTYEELIPTADVVINLTPDKQHTSVIKAVMPLMKQGATLSYSHGFNIVEEGTQIRKDITVIMVAPKCPGSEVRAEYLRGFGVPTLIAVHPENDPQGKGLAEAKAYCVGTGGHRAGVLRSSFVAEVKSDLMGEQTILCGLLQTGSILSFDKMIEKGIDAGYASKLVQYGVEVITEALKQGGVTAMMDRLSNVAKIKAFDIAEELKTIMRPLFQKHQDDIMSGEFSRVMMEDWANNDKNLLGWRAATGETAFEKTPAGDVKIGEQEYFDNAVFMVAYIKAGVELAFETMVEAGIKPESAYYESLHETPLIANTIARKKLFEMNRVISDTAEYGCYLFDHACKPLLADFMKTVNTDIIGKNYNEGKDGAVDNRELIAVNEAIRTHPVEIVGAVLRKAMTAMKTIKTV

SEQ ID NO: 449 - protein, 493 aa, Actinobacillus minor
MANYFNTLNLREKLDQLGRCRFMDRSEFADGCNFLKGKKIVIVGCGAQGLNQGLNMRDSGLDIAYALRAEAIAEKRASFTRASENGFKVGTYQELIPTADLVINLTPDKQHSKVVADVMPLMKQGAAFGYSHGFNIVEEGEQIRKDITVVMTAPKCPGTEVREEYKRGFGVPTLIAVHPENDPKGEGMAIAKAWASATGGDRAGVLESSFVAEVKSDLMGEQTILCGMLQAGSIVCYDKLVADGKDPAYASKLIQYGWETITEALKQGGITLMMDRLSNSAKIRAFELAEEIKAQLNFLYLKHMDDIISGEFSSTMMADWANGDANLLKWREETGKTAFENSPKTDGIKISEQEYFDNGVVMVAMVKAGVEMAFDAMVASGIYEESAYYESLHELPLIANTIARKRLYEMNVVISDTAEYGNYLFSHVATPILAEKLIPMLQKGDLGEPTPTVEIDNVYLRDINDAIRNHPVELIGQELRGYMTDMKRIAVGD

SEQ ID NO: 450 - protein, 493 aa, Mannheimia haemolytica
MANYFNTLNLRQKLDQLGRCRFMDRDEFADGCNFLKGKKIVIVGCGAQGLNQGLNMRDSGLDIAYALRAEAIAEKRASFKRASENGFVVGTYEQLIPEADLVINLTPDKQHSKVVADVMPLMKQGAAFGYSHGFNIVEEGEQIRPDLTVVMTAPKCPGTEVREEYKRGFGVPTLIAVHPENDPKGEGLAIAKAWASATGGDRAGVLESSFVAEVKSDLMGEQTILCGMLQAGSIVCYDKLVSEGKDPAYAGKLIQYGWETITEALKQGGITLMMDRLSNSAKLRAFELSEQIKEELAFLFEKHMDDIISGEFSSTMMADWANGDANLLKWREETGKTAFENAPQADGIKISEQEYFDNGVLMVAMVKAGVELAFDTMVSAGIYEESAYYESLHELPLIANTIARKRLYEMNVVISDTAEYGNYLFSHVATPILAEKIIPTLEKGDLGEPTPAVEIDNVTLRDVNDAIRNHPIELIGQELRGYMTDMKRISSQG

SEQ ID NO: 451 - protein, 493 aa, Actinobacillus minor
MANYFNTLNLREKLDQLGRCRFMDRSEFADGCNFLKGKKIVIVGCGAQGLNQGLNMRDSGLDIAYALRAEAIAEKRASFTRASENGFKVGTYQELIPTADLVINLTPDKQHSKVVADVMPLMKQGAAFGYSHGFNIVEEGEQIRKDITVVMTAPKCPGTEVREEYKRGFGVPTLIAVHPENDPKGEGMAIAKAWASATGGDRAGVLESSFVAEVKSDLMGEQTILCGMLQAGSIVCYDKLVADGKDPAYASKLIQYGWETITEALKQGGITLMMDRLSNSAKIRAFELAEEIKAQLNFLYLKHMDDIISGEFSSTMMADWANGDANLLKWREETGKTAFENSPKADGIKISEQEYFDNGVVMVAMVKAGVEMAFDAMVASGIYEESAYYESLHELPLIANTIARKRLYEMNVVISDTAEYGNYLFSHVATPILAEKLIPMLQKGDLGEPTPTVEIDNVYLRDINDAIRNHPVELIGQELRGYMTDMKRIAVGD

SEQ ID NO: 452 - protein, 493 aa, Sphingobacterium spiritivorum
MANYFNTLPLREQLNQLGVAEFMDSTEFADGVEALKGKKLVIVGCGAQGLNQGLNLRDSGLDVSYTLRKEAIEQKRDSWKNATDNNFTVGTYEELIPTADVVINLTPDKQHTSVINAVMPLMKQGATLSYSHGFNIVEEGMQIRKDITVIMVAPKCPGSEVRAEYLRGFGVPTLIAVHPENDPQGKGLAEAKAYCVGTGGHRAGVLRSSFVAEVKSDLMGEQTILCGLLQTGSILSFDKMIEKGIDAGYASKLVQYGVEVITEALKQGGVTAMMDRLSNVAKIKAFDIAEELKTIMRPLFQKHQDDIMSGEFSRVMMEDWANNDKNLLGWRAATGETAFEKTPAGDVKIGEQEYFDNAVFMVAYIKAGVELAFETMVEAGIKPESAYYESLHETPLIANTIARKKLFEMNRVISDTAEYGCYLFDHACKPLLADFMKTVNTDIIGKNYNEGKDGAVDNRELIAVNEAIRTHPVEIVGAELRKAMTAMKAIKTV

SEQ ID NO: 453 - protein, 493 aa, Actinobacillus pleuropneumoniae
MANYFNTLNLRQKLDQLGRCRFMDRNEFADGCNFLKGKKIVIVGCGAQGLNQGLNMRDSGLDISYALRAEAIAEKRASFTRATENGFKVGTYQELIPTADLVINLTPDKQHSKVVADVVPLMKQGSAFGYSHGFNIVEEGEQIRKDITVVMTAPKCPGTEVREEYKRGFGVPTLIAIHPENDPKGEGMAIAKAWASATGGDRAGVLESSFVAEVKSDLMGEQTILCGMLQAGSIVCYDKLVADGKDPAYASKLIQYGWETITEALKQGGITLMMDRLSNAAKIRAFELSEEIKIQLNDLYLKHMDDIISGEFSSTMMADWANGDVNLFKWREETGKTAFENSPKADGIKISEQEYFDNGVVMVAMVKAGVEMAFDAMVASGIYEESAYYESLHELPLIANTIARKRLYEMNVVISDTAEYGNYLFSHVATPILAEKLIPMLQKGDLGEPTPAAEIDNVYLRDINDAIRNHPVELIGQELRGYMTDMKRISSQG

SEQ ID NO: 454 - protein, 493 aa, Actinobacillus pleuropneumoniae
MANYFNTLNLRQKLDQLGRCRFMDRNEFADGCNFLKGKKIVIVGCGAQGLNQGLNMRDSGLDISYALRAEAIAEKRASFTRATENGFKVGTYQELIPTADLVINLTPDKQHSKVVADVVPLMKQGSAFGYSHGFNIVEEGEQIRKDITVVMTAPKCPGTEVREEYKRGFGVPTLIAVHPENDPKGEGMAIAKAWASATGGDRAGVLESSFVAEVKSDLMGEQTILCGMLQAGSIVCYDKLVADGKDPAYASKLIQYGWETITEALKQGGITLMMDRLSNAAKIRAFELSEEIKIQLNDLYLKHMDDIISGEFSSTMMADWANGDVNLFKWREETGKTAFENSPKADGIKISEQEYFDNGVVMVAMVKAGVEMAFDAMVASGIYEESAYYESLHELPLIANTIARKRLYEMNVVISDTAEYGNYLFSHVATPILAEKLIPMLQKGDLGEPTPAAEIDNVYLRDINDAIRNHPVELIGQELRGYMTDMKRISSQG

SEQ ID NO: 455 - protein, 493 aa, Actinobacillus pleuropneumoniae
MANYFNTLNLRQKLDQLGRCRFMDRNEFADGCNFLKGKKIVIVGCGAQGLNQGLNMRDSGLDINYALRAEAIAEKRASFTRATENGFKVGTYQELIPTADLVINLTPDKQHSKVVADVVPLMKQGSAFGYSHGFNIVEEGEQIRKDITVVMTAPKCPGTEVREEYKRGFGVPTLIAVHPENDPKGEGMAIAKAWASATGGDRAGVLESSFVAEVKSDLMGEQTILCGMLQAGSIVCYDKLVADGKDPAYASKLIQYGWETITEALKQGGITLMMDRLSNAAKIRAFELSEEIKIQLNDLYLKHMDDIISGEFSSTMMADWANGDVNLFKWREETGKTAFENSPKADGIKISEQEYFDNGVVMVAMVKAGVEMAFDAMVASGIYEESAYYESLHELPLIANTIARKRLYEMNVVISDTAEYGNYLFSHVATPILAEKLIPMLQKGDLGEPTPAAEIDNVYLRDINDAIRNHPVELIGQELRGYMTDMKRISSQG

SEQ ID NO: 456 - protein, 493 aa, Actinobacillus pleuropneumoniae
MANYFNTLNLRQKLDQLGRCRFMDRNEFADGCNFLKGKKIVIVGCGAQGLNQGLNMRDSGLDISYALRAEAIAEKRASFTRATENGFKVGTYQELIPTADLVINLTPDKQHSKVVADVVPLMKQGSAFGYSHGFNIVEEGEQIRKDITVVMTAPKCPGTEVREEYKRGFGVPTLIAVHPENDSKGEGMAIAKAWASATGGDRAGVLESSFVAEVKSDLMGEQTILCGMLQAGSIVCYDKLVADGKDPAYASKLIQYGWETITEALKQGGITLMMDRLSNAAKIRAFELSEEIKVQLNDLYLKHMDDIISGEFSSTMMADWANGDVNLFKWREETGKTAFENSPKADGIKISEQEYFDNGVVMVAMVKAGVEMAFDAMVASGIYEESAYYESLHELPLIANTIARKRLYEMNVVISDTAEYGNYLFSHVATPILAEKLIPMLQKGDLGEPTPAAEIDNVYLRDINDAIRNHPVELIGQELRGYMTDMKRISSQG

SEQ ID NO: 457 - protein, 493 aa, Actinobacillus pleuropneumoniae
MTNYFNTLNLRQKLDQLGRCRFMDRNEFADGCNFLKGKKIVIVGCGAQGLNQGLNMRDSGLDISYALRAEAIAEKRASFTRATENGFKVGTYQELIPTADLVINLTPDKQHSKVVADVVPLMKQGSAFGYSHGFNIVEEGEQIRKDITVVMTAPKCPGTEVREEYKRGFGVPTLIAVHPENDPKGEGMAIAKAWASATGGDRAGVLESSFVAEVKSDLMGEQTILCGMLQAGSIVCYDKLVADGKDPAYASKLIQYGWETITEALKQGGITLMMDRLSNAAKIRAFELSEEIKVQLNDLYLKHMDDIISGEFSSTMMADWANGDVNLFKWREETGKTAFENSPKADGIKISEQEYFDNGVVMVAMVKAGVEMAFDAMVASGIYEESAYYESLHELPLIANTIARKRLYEMNVVISDTAEYGNYLFSHVATPILAEKLIPMLQKGDLGEPTPAAEIDNVYLRDINDAIRNHPVELIGQELRGYMTDMKRISSQG

SEQ ID NO: 458 - protein, 493 aa, Unknown
  Enterobacteriaceae bacterium
MANYFNTLNLRQQLAQLGKCRFMGREEFADEAGYLKGKKVVIVGCGAQGLNQGLNMRDSGLDVSYALRAEAIAEKRASWRKATENGFKVGTYEDLIPQADLVVNLTPDKQHSAVVKAVQPLMKDGAALGYSHGFNIVEVGEQIRKDITVVMVAPKCPGTEVREEYKRGFGVPTLIAVHPENDPKGEGMAIAKAWAAATGGHRAGVLESSFVAEVKSDLMGEQTILCGMLQAGSLLCFDKLVADGTDPAYAEKLVQFGWETITEALKQGGITLMMDRLSNPAKLRAYALSEQLKGIMAPLFQKHMDDIISGAFSSGMMADWAEDDIKLLTWREETGKTAFETAPQFEGKIAEQDYFDQGVLMIAMVKAGVELAFETMVASGIIEESAYYESLHELPLIANTIARKRLYEMNVVISDTAEYGNYLFANAAVPLLKEKFMSSLQTGDLGKAASTATAVDNAQLRDVNEAIRNHPIEAVGHKLRGYMKDMKRIAVAG

SEQ ID NO: 459 - protein, 493 aa, Actinobacillus ureae
MANYFNTLNLRQKLDQLGRCRFMDRSEFADGCNFLKGKKIVIVGCGAQGLNQGLNMRDSGLDISYALRAEAIAEKRASFTRATENGFKVGTYQELIPTADLVINLTPDKQHSKVVADVVPLMKQGSAFGYSHGFNIVEEGEQIRKDITVVMTAPKCPGTEVREEYKRGFGVPTLIAVHPENDPKGEGMAIAKAWASATGGDRAGVLESSFVAEVKSDLMGEQTILCGMLQAGSIVCYDKLVADGKDPAYASKLIQYGWETITEALKQGGITLMMDRLSNAAKIRAFELSEEIKVQLNDLYLKHMDDIISGEFSSTMMADWANGDANLLKWREETGKTAFENSPKADGIKISEQEYFDNGVVMVAMVKAGVEMAFDAMVASGIYEESAYYESLHELPLIANTIARKRLYEMNVVISDTAEYGNYLFSHIATPILAEKLIPMLQKGDLGEPTPAAEIDNVYLRDINDAIRNHPVELIGQELRGYMTDMKRISSQG

SEQ ID NO: 460 - protein, 493 aa, Succinatimonas hippei
MANYFNTLNLRQKLAQLGCCELMDRSEFADGCNFLKGKKCVIIGCGAQGLNQGLNMRDSGLDVSYALRPAAIAEKRASFKRATENGFKVGTYEELIPTADLVINLTPDKQHSNVVESVMPLMKPGAALGYSHGFNIVEVGQQIRKDITVVMMAPKAPGTEVREEYRRGFGVPTLIAVHPENDPNGEGWAIAKAWASATGGDRAGVLRSSFVAEVKSDLMGEQTILCGVLQAASILCFDRMVELGMDKAYACKLIQYGWETVCEALKQGGITNMMDRLSNPAKIRACELADELKCILKDLYLKHMDDIESGEFSRVLMEDWANGDVKLLTWRENFAKCGFENAPQCDTKITEQEYFDKCILLVAFVKAGIELSFETMTHSGIYPESAYYESLHELPLIANLIARRRLYEMNVVISDTAEYGDYLFANAAIPLLKDFMSKINLDVMGKGLEGDNAVDNIELIRINDKIRNHPIEIVGRKLRAYMSDMKEIAVGNN

SEQ ID NO: 461 - protein, 493 aa, Haemophilus parainfluenzae
MANYFNTLNLREKLDQLGRCRFMDRSEFADGCNYLKGKKIVIVGCGAQGLNQGLNMRDSGLDISYALRPEAIAEKRASFQRATENGFKVGTYQELIPTADLVINLTPDKQHSKVVADVMPLMKKDSAFGYSHGFNIVEVGEQIREDITVVMSAPKCPGTEVREEYKRGFGVPTLIAVHPANDPRGEGMAIAKAWAAATGGDRAGVLESSFVAEVKSDLMGEQTILCGMLQAGSIVCYDKLVANGKDPAYAGKLIQYGWETITEALKQGGITLMMDRLSNSAKLRAFELAEQIKESLGFLYYKHMDDIISGHFSATMMADWANGDKDLFAWREATGKTAFENAPKADGIKISEQEYFDNGVLMVAMVKAGVELAFDAMVASGIYEESAYYESLHELPLIANTIARKRLYEMNVVISDTAEYGNYLFSNVATPILAKEIIPALQKGDLGEPTPAVAIDNITLRDVNDAIRNHPVELIGQELRGYMTDMKRIAVAG

SEQ ID NO: 462 - protein, 493 aa, Aeromonas caviae
MANYFNTLNLRQQLAQLGKCRFMQREEFADGCNVLKGKKVVIVGCGAQGLNQGLNMRDSGLDISYALRKAAITEKRASWQKATDNGFAVGTYEELIPTADLVLNLTPDKQHSDVVKTVMPLMKQGAALGYSHGFNVVEEGQQIRADITVVMVAPKCPGTEVREEYKRGFGVPTLIAVHPENDPQGEGMAIAKAWASATGGDRAGVLESSFVAEVKSDLMGEQTILCGMLQAGSLLCYDKLVAEGTDPAYAGKLIQFGWETITEALKQGGISLMMDRLSNPAKLRAFELSEQLRTLMRPLFEKHMDDIIAGEFSRGMMADWAEDDAKLFGWREETGKSAFENAPAYAGKIAEQEYFDNGVVMVAMVKAGVELAFETMVASGIYEESAYYESLHELPLIANTVARKRLYEMNVVISDTAEYGNYLFANAAVPLLREHFMPTLQAGDLGSARAESKAVDNLALLAANEATRNHPIEKIGQTLRGYMKDMKRIAVGG

SEQ ID NO: 463 - protein, 493 aa, Haemophilus pittmaniae
MANYFNTLNLREKLDQLGRCRFMDRSEFADGCNYLKGKKIVIVGCGAQGLNQGLNMRDSGLDIAYALRPEAIAEKRASFQRATENGFKVGTYQELIPTADLVINLTPDKQHSKVVADVMPLMKKDSAFGYSHGFNIVEVGEQIREDITVVMTAPKCPGTEVREEYKRGFGVPTLIAVHPANDPRGEGMAIAKAWAAATGGDRAGVLESSFVAEVKSDLMGEQTILCGMLQAGSIVCYDKLVADGKDPAYAGKLIQYGWETITEALKQGGITLMMDRLSNSAKLRAFELAEQIKESLGFLYYKHMDDIISGHFSATMMADWANGDKDLFAWREATGKTAFENAPKADGIKISEQEYFDNGVLMVAMVKAGVELAFDAMVASGIYEESAYYESLHELPLIANTIARKRLYEMNVVISDTAEYGNYLFSNVATPILAKEIIPTLQKGDLGEPTPAVAIDNITLRDVNDAIRNHPVELIGQELRGYMTDMKRIAVAG

SEQ ID NO: 464 - protein, 492 aa, Unknown
  uncultured gamma proteobacterium
MSNYFNSLPLRTQLQELGKCRFMDSSEFEAGITPLAGQTLVIIGCGAQGFNQGLNLRDSGLNVSYALRKEAIEEQRPSWVKATEAGFQVGTYDEMVPNADMVLNLTPDKQHTAVVTAVMPLMKEGACLSYSHGFNIVEEGMKIREDLTVIMVAPKCPGTEVREEYLRGFGVPTLIAVHLENDPQGKGLELAKAYAAGTGGHRAGVLESSFVAEVKSDLMGEQTILCGMLQTGSLLCFDRMVELGIEPAYAAKLVQYGWETVTEGLKQGGITNMMDRLSNPAKIRAFDLAEEMKSTLRPLFEKHQDDIISGHFSSTMMTDWAAGDANLLKWRAETNGTPFELQDITEAPIDEQTYYDQSVLMIAMVKAGVELAYETMVSAGIIEESAYYESLHETPLIANTIARKKLYEMNVVISDTAEYGCYLFDQAARPLLKAFVSSLGKEVMGEGMGSSIAVDNRRLIDVNAAIRSHSVEVVGARLRGYMTGMKAITSPQ

SEQ ID NO: 465 - protein, 492 aa, Erwinia sp.
MANYFNTLNLRNQLAQLGKCRFMAREEFADEASYLKGKKVVIVGCGAQGLNQGLNMRDSGLNIAYALRAEAIAEKRASWRKATENGFKVGTYEELIPQADLVVNLTPDKQHTSVVQAVQPLMKDGAALGYSHGFNIVEVGEQVRKDVTVVMVAPKCPGTEVREEYKRGFGVPTLIAVHPENDPKGEGMAIAKAWAAATGGHRAGVLESSFVAEVKSDLMGEQTILCGMLQAGSLLCFDKLVAEGTDAAYAEKLIQFGWETITEALKQGGITLMMDRLSNPAKLRAYALSEQLKTIMAPLFQKHMDDIISGEFSSGMMADWANDDKKLLGWREETGKTAFETAAQFEGKIGEQDYFDQGVVMIAMVKAGVELAFETMVAAGIVEESAYYESLHELPLIANTIARKRLYEMNVVISDTAEYGNYLFSYAAVPLLKEFMTTLQAGDLGKQVNPSTSVDNAQLRDVNEAIRHHDIETVGRKLRGYMTDMKRIAVAG

SEQ ID NO: 466 - protein, 492 aa, Shewanella putrefaciens
MANYFNSLNLRQQLAQLGQCRFMDRSEFTHGCNYIKDWNIVILGCGAQGLNQGLNMRDSGLNISYALRPEAIEQKRASWQKATDNGFRVGTFEELIPTADLVLNLTPDKQHSNVVNAVMPLMKQGATLSYSHGFNIVEEGMQVRPDITVIMVAPKCPGTEVREEYKRGFGVPTLIAVHPENDPKGDGLEIAKAYASATGGDRAGVLLSSFIAEVKSDLMGEQTILCGMLQTGAILGYEKMVADGVEPGYAAKLIQQGWETVTEALKHGGITNMMDRLSNPAKIKAFEIAEDLKEILQPLFEKHMDDIISGEFSRTMMEDWANDDANLLRWRAETGETGFENAPVSSEHIDEQTYFDKGIFLVAMIKAGVELAFDTMVSAGIVEESAYYESLHETPLIANTIARKRLYEMNVVISDTAEYGCYLFNHAAVPMLRDYVNAMSPEYLGAGLKDSSNSVDNLQLIAINDAIRHTAVEYVGAELRGYMTDMKSIVGA

SEQ ID NO: 467 - protein, 492 aa, Yersinia enterocolitica
MANYFNTLNLRQQLAQLGKCRFMARDEFADEANYLKGKKVVIVGCGAQGLNQGLNMRDSGLDVAYALRKEAITEKRASWRKATENGFKVGTYEELIPQADLVVNLTPDKQHSAVVQAVQPLMKDGAALGYSHGFNIVEVGEQVRKDITVVMVAPKCPGTEVREEYKRGFGVPTLIAVHPENDPKGEGMATAKAWAAATGGHRAGVLESSFVAEVKSDLMGEQTILCGMLQAGSLLCFDKLVSEGTDAAYAEKLVQFGWETITEALKQGGITLMMDRLSNPAKLRAYALSEQLKEIMAPLFQKHMDDIISGEFSSGMMADWANDDKKLLNWREETGKTAFENAPQFEGKISEQEYFDHGVLMIAMVKAGVELAFETMVDSGIIEESAYYESLHELPLIANTIARKRLYEMNVVISDTAEYGNYLFANAAVPLLKGKFMDSLQTGDLGKSVAGTAVDNAQLRDVNEAIRNHPIEAVGHKLRGYMTDMKRIAVAG

SEQ ID NO: 468 - protein, 492 aa, Haemophilus haemolyticus
MANYFNTLNLRQKLDQLGRCRFMDREEFADEANFLKGKKIVIVGCGAQGLNQGLNMRDSGLDISYALRPEAIAEKRASFQRATENGFKVGTYEELIPTADLVVNLTPDKQHSKVVADVMPLMKKDSAFGYSHGFNIVEVGEEIRKDITVVMVAPKCPGTEVREEYKRGFGVPTLIAVHPENDPKGEGLAIAKAWAAATGGHKAGVLESSFVAEVKSDLMGEQTILCGMLQAGSIVCYDKLVADGKDPAYAGKLIQYGWETITEALKQGGITLMMDRLSNSAKLRAFELAEQIKESLGFLYYKHMDDIISGHFSATMMADWANGDKDLFAWREATGKTAFENAPKYDGKISEQEYFDNGVLMIAMVKAGVELAFDAMVASGIYEESAYYESLHELPLIANTIARKRLYEMNVVISDTAEYGNYLFSNVATPILAKEIIPNLQKGDLGEPTPTVEVDNITLRDVNDAIRNHPVELIGQELRGYMTDMKRIAVAG

SEQ ID NO: 469 - protein, 492 aa, Haemophilus haemolyticus
MANYFNTLNLRQKLDQLGRCRFMDREEFADEANFLKGKKIVIVGCGAQGLNQGLNMRDSGLDISYALRPEAIAEKRTSFQRATENGFKVGTYEELIPTADLVVNLTPDKQHSKVVADVMPLMKKDSAFGYSHGFNIVEVGEQIRKDITVVMVAPKCPGTEVREEYKRGFGVPTLIAVHPENDPKGEGMAIAKAWAAATGGHKAGVLESSFVAEVKSDLMGEQTILCGMLQAGSIVCYDKLVADGKDPAYAGKLIQYGWETITEALKQGGITLMMDRLSNSAKLRAFELAEQIKESLGFLYYKHMDDIISGHFSATMMADWANGDKDLFAWREATGKTAFENAPKYDGKISEQEYFDNGVLMIAMVKAGVELAFEAMVASGIYEESAYYESLHELPLIANTIARKRLYEMNVVISDTAEYGNYLFSNVATPILAKEIIPNLQKGDLGEPTPAVEIDNITLRDVNDAIRNHPVELIGQELRGYMTDMKRIAVAG

SEQ ID NO: 470 - protein, 492 aa, Haemophilus haemolyticus
MTNYFNTLNLRQKLDQLGRCRFMDREEFADEANFLKGKKIVIVGCGAQGLNQGLNMRDSGLDISYALRPEAIAEKRTSFQRATENGFKVGTYEELIPTADLVVNLTPDKQHSKVVADVMPLMKKDSAFGYSHGFNIVEVGEEIRKDITVVMVAPKCPGTEVREEYKRGFGVPTLIAVHPENDPKGEGMAIAKAWVAATGGHKAGVLESSFVAEVKSDLMGEQTILCGMLQAGSIVCYDKLVADGKDPAYAGKLIQYGWETITEALKQGGITLMMDRLSNSAKLRAFELAEQIKESLGFLYYKHMDDIINGHFSATMMADWANGDKDLFAWREATGKTAFENAPKYDGKISEQEYFDNGVLMIAMVKAGVELAFEAMVASGIYEESAYYESLHELPLIANTIARKRLYEMNVVISDTAEYGNYLFSNVATPILAKEIIPNLQKGDLGEPTPVAEIDNITLRDVNDAIRNHPVELIGQELRGYMTDMKRIAVAG

SEQ ID NO: 471 - protein, 492 aa, Aggregatibacter aphrophilus
MANYFNTLNLRQQLDQLGRCRFMDRSEFATEADFLKGKKIVIVGCGAQGLNQGLNMRDSGLDISYALRPEAIAEKRASFQRASENGFKVGTYEELIPTADLVINLTPDKQHSKVVADVMPLMKKGAALGYSHGLNIVEVGEQIRPDITVVMVAPKCPGTEVREEYKRGFGVPTLIAVHPENDPQGEGLEIAKAWAAATGGHRAGVLESSFVAEVKSDLMGEQTILCGMLQAGSIICYDKLVADGKDPAYAGKLVQYGWETITEALKQGGITLMMDRLSNSAKLRAFELAEQIKEELAFLFAKHMDDIISGEFSRVMMEDWANGDANLLKWREETGKTAFENAPKYDGKISEQEYFDHGVLMIAMVKAGVELAFDTMVASGIYEESAYYESLHELPLIANTIARKRLYEMNVVISDTAEYGNYLFANVAGPIMQKALVPTLRKGDIGEPTPTVEIDNITLRDVNDEIRNHPVELIGQELRGYMKDMKRVSLQG

SEQ ID NO: 472 - protein, 492 aa, Haemophilus influenzae
MANYFNTLNLRQKLDQLGRCRFMDREEFADEANFLKGKKIVIVGCGAQGLNQGLNMRDSGLDISYALRPEAIAEKRASFQRATENGFKVGTYEELIPTADLVVNLTPDKQHSKVVADVMPLMKKDSAFGYSHGFNIVEVGEEIRKDITVVMVAPKCPGTEVREEYKRGFGVPTLIAVHPENDPKGEGMAIAKAWAAATGGHKAGVLESSFVAEVKSDLMGEQTILCGMLQAGSIVCYDKLVADGKDPAYAGKLIQYGWETITEALKQGGITLMMDRLSNSAKLRAFELAEQIKESLGFLYYKHMDDIISGHFSATMMADWANGDKDLFAWREATGKTAFENAPKYDGKISEQEYFDNGVLMIAMVKAGVELAFDAMVASGIYEESAYYESLHELPLIANTIARKRLYEMNVVISDTAEYGNYLFSNVATPILAKEIIPNLQKGDLGEPTPAVEVDNITLRDVNDAIRNHPVELIGQELRGYMTDMKRIAVAG

SEQ ID NO: 473 - protein, 492 aa, Yersinia pestis
MANYFNTLNLRQQLAQLGKCRFMARDEFADEAGYLKGKKVVIVGCGAQGLNQGLNMRDSGLDVAYALRKEAIAEKRASWRKATENGFKVGTYEELIPQADLVVNLTPDKQHSAVVKAVQPLMKEGAALGYSHGFNIVEVGEQVRKDITVVMVAPKCPGTEVREEYKRGFGVPTLIAVHPENDPKGEGMAIAKAWAAATGGHRAGVLEFSFVAEVKSDLMGEQTILCGMLQAGSLLCFDKLVSEGTDAAYAEKLIQFGWETITEALKQGGITLMMDRLSNPAKLRAYALSEQLKEIMAPLFQKHMDDIISGAFSSGMMADWANDDVKLLNWREETGRTAFENAPQFEGKISEQEYFDHGVLMIAMVKAGVELAFETMVDSGIIEESAYYESLHELPLIANTIARKRLYEMNVVISDTAEYGNYLFANAAVPLLKEKFMDSLQAGDLGKSIPGSAVDNAQLRDVNEAIRNHPIEAVGHKLRGYMTDMKRIAVAG

SEQ ID NO: 474 - protein, 492 aa, Shewanella oneidensis
MANYFNSLNLRQQLAQLGQCRFMDRSEFSDGCNYIKDWNIVILGCGAQGLNQGLNMRDSGLNIAYALRPEAIAQKRASWQKATDNGFKVGTFEELIPSADLVLNLTPDKQHSNVVSAVMPLMKQGATLSYSHGFNIVEEGMQIRPDITVIMVAPKCPGTEVREEYKRGFGVPTLIAVHPENDPNGDGLDIAKAYASATGGDRAGVLQSSFIAEVKSDLMGEQTILCGMLQTGAILGYEKMVADGVEPGYAAKLIQQGWETVTEALKHGGITNMMDRLSNPAKIKAFEIAEDLKDILQPLFEKHMDDIISGEFSRTMMQDWANDDANLLRWRAETGETGFENAPVSSEHIDEQTYFDKGIFLVAMIKAGVELAFDTMVSAGIVEESAYYESLHETPLIANTIARKRLYEMNVVISDTAEYGCYLFNHAAVPLLRDYVNAMSPEYLGAGLKDSSNSVDNLQLIAINDAIRHTAVEYVGAELRGYMTDMKSIVGA

SEQ ID NO: 475 - protein, 492 aa, Candidatus Blochmannia floridanus
MNNYFNKLTFIQKIKHLGQCRLMKKNEFSDGVRALLSKKIVIIGCGSQGLNQGLNMRDSGLNITYALRRDSIINQSQSYIRAMKYGFSVGTYDELIPEADFVINLIPDKYHESLIQKIEPLMKYKAVLGYSHGFHIVEIGVKIRQDITVIMVAPKCPGTEVRQEYQRGFGVPALIAVHEENNAYGTGMELAKSWACSIGSNKAGVLESSFVAEVKSDLMGEQTVLCGMLQVGSIFCFDKMVEDGLDSGYAGKLVQNGWEVITEALKQGGITLMMDRLSNVSKLRAFELSDQLKNILTPVFEKHMEDILDGSFSKNMMLDWINKDCKLLSYRQNNSQLLFEKAPVYCETILEQTYFDHGVLMVAIIKASVELAFDIMVKSGIKPESAYYESLHELPLIANTIARKRLYEMNMVISDTAEYGNYLFSDFVLPLLKKEFVPYLKRGDLDLSHVNNIVHIDNILLRDINEMIRTHPIEKVGVQLRSYMKDMVSLSF

SEQ ID NO: 476 - protein, 492 aa, Photorhabdus luminescens
MANYFNTLNLRQQLAQLGKCRFMAREEFVDETGYLKGKKVVIVGCGAQGLNQGLNMRDSGLDIAYALRKEAIEEKRASWRKATENGFQVGTYEELIPQADLVINLTPDKQHSSVVSAVQPLMKEGAALGYSHGLNIVEVGEQIRKDITVVMVAPKCPGTEVREEYKRGFGVPTLIAVHPENDPKGEGMAIAKAWAAATGAHRAGVLESSFVAEVKSDLMGEQTILCGMLQAGSLLCYDKLVADGAEPGYAGKLIQFGWETITEALKQGGITLMMDRLSNPAKLRAYALSEQLKEMMTPLFQKHMDDIISGEFSSGMMADWANDDKKLLGWREETGNTSFENSPEYDGKISEQEYFDHGVLMVAMVKAGVELAFEIMVDTGIIAESAYYESLHELPLIANTISRKRLYEMNVVISDTAEYGNYLFSHVAVPLLKEKFMGSLQAGDLGKPVVDNGIDNAQLRDVNEAIRHHPIEVVGRVLRGYMTDMKRIAVGG

SEQ ID NO: 477 - protein, 492 aa, Yersinia enterocolitica
MANYFNTLNLRQQLAQLGKCRFMARDEFADEAGYLKGKKVVIVGCGAQGLNQGLNMRDSGLDVAYALRKEAIAEKRASWRKATENGFKVGTYEELIPQADLVVNLTPDKQHSAVVQAVQPLMKDGAALGYSHGFNIVEVGEQVRKDITVVMVAPKCPGTEVREEYKRGFGVPTLIAVHPENDPKGEGMAIAKAWAAATGGHRAGVLESSFVAEVKSDLMGEQTILCGMLQAGSLLCFDKLVSEGTDAAYAEKLIQFGWETITEALKQGGITLMMDRLSNPAKLRAYALSEQLKEIMAPLFQKHMDDIISGEFSSGMMADWANDDKKLLNWREETGKTAFENAPQFEGKISEQEYFDHGVLMIAMVKAGVELAFETMVDSGIIEESAYYESLHELPLIANTIARKRLYEMNVVISDTAEYGNYLFANAAVPLLKGKFMDSLQAGDLGKSVAGTAVDNAQLRDVNEAIRNHPIEAVGHKLRGYMTDMKRIAVAG

SEQ ID NO: 478 - protein, 492 aa, Shewanella baltica
MANYFNSLNLRQQLAQLGQCRFMDRSEFSDGCNYIKDWNIVILGCGAQGLNQGLNMRDSGLNISFALRPEAIEQKRASWQKATDNGFRVGTFEELIPAADLVLNLTPDKQHSNVVNAVMPLMKQGSTLSYSHGFNIVEEGMQVRPDITVVMVAPKCPGTEVREEYKRGFGVPTLIAVHPENDPDGDGLEIAKAYASATGGDRAGVLLSSFIAEVKSDLMGEQTILCGMLQTGAILGYEKMIADGVEPGYAAKLIQQGWETVTEALKHGGITNMMDRLSNPAKIKAFEIAEDLKEILQPLFEKHMDDIISGEFSRTMMEDWANDDANLLRWRAETGETGFENAPVSSEHIDEQTYFDKGIFLVAMIKAGVELAFDTMVSAGIVEESAYYESLHETPLIANTIARKRLYEMNVVISDTAEYGCYLFNHAAVPMLRDYVNAMSSEYLGAGLKDSATGVDNLTLIAVNEAIRETAVEYVGAELRGYMTDMKSIVEA

SEQ ID NO: 479 - protein, 492 aa, Shewanella putrefaciens
MANYFNSLNLRQQLAQLGQCRFMDRSEFTDGCNYIKDWNIVILGCGAQGLNQGLNMRDSGLNISYALRPEAIEQKRASWQKATDNGFRVGTFEELIPTADLVLNLTPDKQHSNVVNAVMPLMKQGATLSYSHGFNIVEEGMQVRPDITVIMVAPKCPGTEVREEYKRGFGVPTLIAVHPENDPKGDGLEIAKAYASATGGDRAGVLLSSFIAEVKSDLMGEQTILCGMLQTGAILGYEKMVADGVEPGYAAKLIQQGWETVTEALKHGGITNMMDRLSNPAKIKAFEIAEDLKEILQPLFEKHMDDIISGEFSRTMMEDWANDDANLLRWRAETGETGFENAPVSSEHIDEQTYFDKGIFLVAMIKAGVELAFDTMVSAGIVEESAYYESLHETPLIANTIARKRLYEMNVVISDTAEYGCYLFNHAAVPMLRDYVNAMSPEYLGAGLKDSSNSVDNLQLIAINDAIRHTAVEYVGAELRGYMTDMKSIVGA

SEQ ID NO: 480 - protein, 492 aa, Haemophilus influenzae
MANYFNTLNLRQKLDQLGRCRFMDREEFADEANFLKGKKIVIVGCGAQGLNQGLNMRDSGLDISYALRPEAIAEKRASFQRATENGFKVGTYEELIPTADLVVNLTPDKQHSKVVADVMPLMKKDSAFGYSHGFNIVEVGEEIRKDITVVMVAPKCPGTEVREEYKRGFGVPTLIAVHPENDPKGEGLAIAKAWAAATGGHKAGVLESSFVAEVKSDLMGEQTILCGMLQAGSIVCYDKLVADGKDPAYAGKLIQYGWETITEALKQGGITLMMDRLSNSAKLRAFELAEQIKKSLGFLYYKHMDDIVSGHFSATMMADWENDDKDLFAWREATGKTAFENAPKYDGKISEQEYFDNGVLMIAMVKAGVELAFDAMVASGIYEESAYYESLHELPLIANTIARKRLYEMNVVISDTAEYGNYLFSNVATPILAKEIIPNLQKGDLGEPTPAVEVDNITLRAVNDAIRNHPVELIGQELRGYMTDMKRIAVAG

SEQ ID NO: 481 - protein, 492 aa, Shewanella baltica
MANYFNSLNLRQQLAQLGQCRFMDRSEFSDGCNYIKDWNIVILGCGAQGLNQGLNMRDSGLNISFALRPEAIEQKRASWQKATDNGFRVGTFEELIPAADLVLNLTPDKQHSNVVNAVMPLMKQGSTLSYSHGFNIVEEGMQVRPDITVVMVAPKCPGTEVREEYKRGFGVPTLIAVHPENDPDGDGLEIAKAYASATGGDRAGVLLSSFIAEVKSDLMGEQTILCGMLQTGAILGYEKMIADGVEPGYAAKLIQQGWETITEALKHGGITNMMDRLSNPAKIKAFEIAEDLKEILQPLFEKHMDDIISGEFSRTMMEDWANDDANLLRWRAETGETGFENAPVSSEHIDEQTYFDKGIFLVAMIKAGVELAFDTMVSAGIVEESAYYESLHETPLIANTIARKRLYEMNVVISDTAEYGCYLFNHAAVPMLRDYVNAMSSEYLGAGLKDSATGVDNLTLIAVNEAIRETAVEYVGAELRGYMTDMKSIVEA

SEQ ID NO: 482 - protein, 492 aa, Shewanella baltica
MANYFNSLNLRQQLAQLGQCRFMDRSEFSDGCNYIKNWNIVILGCGAQGLNQGLNMRDSGLNISFALRPEAIEQKRASWQKATDNGFRVGTFEELIPAADLVLNLTPDKQHSNVVNAVMPLMKQGSTLSYSHGFNIVEEGMQVRPDITVVMVAPKCPGTEVREEYKRGFGVPTLIAVHPENDPDGDGLEIAKAYASATGGDKAGVLLSSFIAEVKSDLMGEQTILCGMLQTGAILGYEKMIADGVEPGYAAKLIQQGWETVTEALKHGGITNMMDRLSNPAKIKAFEIAEDLKEILQPLFEKHMDDIISGEFSRTMMEDWANDDANLLRWRAETGETGFENAPVSSEHIDEQTYFDKGIFLVAMIKAGVELAFDTMVSAGIVEESAYYESLHETPLIANTIARKRLYEMNVVISDTAEYGCYLFNHAAVPMLRDYVNAMSSEYLGAGLKDSATGVDNLTLIAVNEAIRETAVEYVGAELRGYMTDMKSIVEA

SEQ ID NO: 483 - protein, 492 aa, Erwinia tasmaniensis
MANYFNTLNLRNQLAQLGKCRFMAREEFADEASYLKGKKVVIVGCGAQGLNQGLNMRDSGLDIAYALRAEAIAEKRASWRKATENGFKVGTYEELIPQADLVVNLTPDKQHTSVVQAVQPLMKDGAALGYSHGFNIVEVGEQVRKDVTVVMVAPKCPGTEVREEYKRGFGVPTLIAVHPENDPKGEGMAIAKAWAAATGGHRAGVLESSFVAEVKSDLMGEQTILCGMLQAGSLLCFDKLVAEGTDAAYAEKLIQFGWETITEALKQGGITLMMDRLSNPAKVRAYALSEQLKTIMAPLFQKHMDDIISGEFSSGMMADWANDDKKLLGWREETGKTAFETAAQFEGKIGEQDYFDQGVVMIAMVKAGVELAFETMVAAGIVEESAYYESLHELPLIANTIARKRLYEMNVVISDTAEYGNYLFSYAAVPLLQEFMTTLQAGDLGKQAQTSTSVDNAQLRDVNEAIRHHDIETVGRKLRGYMTDMKRIAVAG

SEQ ID NO: 484 - protein, 492 aa, Shewanella baltica
MANYFNSLNLRQQLAQLGQCRFMDRSEFSDGCNYIKNWNIVILGCGAQGLNQGLNMRDSGLNISFALRPEAIEQKRASWQKATDNGFRVGTFEELIPAADLVLNLTPDKQHSNVVNAVMPLMKQGSTLSYSHGFNIVEEGMQVRPDITVVMVAPKCPGTEVREEYKRGFGVPTLIAVHPENDPDGDGLEIAKAYASATGGDRAGVLLSSFIAEVKSDLMGEQTILCGMLQTGAILGYEKMIADGVEPGYAAKLIQQGWETVTEALKHGGITNMMDRLSNPAKIKAFEIAEDLKEILQPLFEKHMDDIISGEFSRTMMEDWANDDANLLRWRAETGETGFENAPVSSEHIDEQTYFDKGIFLVAMIKAGVELAFDTMVSAGIVEESAYYESLHETPLIANTIARKRLYEMNVVISDTAEYGCYLFNHAAVPMLRDYVNAMSSEYLGAGLKDSATGVDNLTLIAVNESIRETAVEYVGAELRGYMTDMKSIVEA

SEQ ID NO: 485 - protein, 492 aa, Erwinia pyrifoliae
MANYFNTLNLRNQLAQLGKCRFMAREEFADEASYLKGKKVVIVGCGAQGLNQGLNMRDSGLDIAYALRAEAIAEKRASWRKATENGFKVGTYEELIPQADLVVNLTPDKQHTSVVQAVQPLMKDGAALGYSHGFNIVEVGEQVRKDVTVVMVAPKCPGTEVREEYKRGFGVPTLIAVHPENDPKGEGMAIAKAWAAATGGHRAGVLESSFVAEVKSDLMGEQTILCGMLQAGSLLCFDKLVAEGTDAAYAEKLIQFGWETITEALKQGGITLMMDRLSNPAKVRAYALSEQLKTIMAPLFQKHMDDIISGEFSSGMMADWANDDKKLLGWREETGKTAFETAAQFEGKIGEQDYFDQGVVMIAMVKAGVELAFETMVAAGIVEESAYYESLHELPLIANTIARKRLYEMNVVISDTAEYGNYLFSYAAVPLLKEFMTTLQAGDLGKQVNPSTSVDNAQLRDVNEAIRHHDIETVGRKLRGYMTDMKRIAVAG

SEQ ID NO: 486 - protein, 492 aa, Edwardsiella ictaluri
MSNYFNTLNLRQQLAQLGKCRFMARTEFADGVNALRGKKVVIVGCGAQGLNQGLNMRDSGLDVAYALRAEAIAERRDSYRRATEHGFCVGDYQALIPQADLVINLTPDKQHAAVVSAVQPLMKPGAALGYSHGFNIVEVGQQIRPDITVVMVAPKCPGTEVREEYKRGFGVPTLIAVHPENDPRGAGMAIAKAWASATGGDRAGVLESSFVAEVKSDLMGEQTILCGMLQTGSLLCYERLVAEGADPAWAGKLIQFGWETITEALKQGGITLMMDRLSNPAKLRAYTLAGQLKTLMAPLFAKHMDDILSGAFSQGMMADWAADDAHLLTWRAETGESAFEKAPPFEGKIDEQTYFDRGVLLVAMVKAGVELAFETMVASGIVAESAYYESLHELPLIANTIARRRLYEMNVVISDTAEYGNYLFANAAVPLLRQGFMETLQPGDLGQPLPAEAVDNAALREVNQAIRQHPIETVGERLRGYMTDMKRVAVAG

SEQ ID NO: 487 - protein, 492 aa, Dickeya dadantii
MANYFNTLNLRQQLAQLGKCRFMGRDEFADEANYLKGKKVVIVGCGAQGLNQGLNMRDSGLDIAYALRAEAIAEKRASWRKATENGFKVGTYEELIPQADLVVNLTPDKQHSAVVQAVQPLMKQGAALGYSHGFNIVEVGEQIRKDITVVMVAPKCPGTEVREEYKRGFGVPTLIAVHPENDPKGEGMAIAKAWAAATGGHRAGVLESSFVAEVKSDLMGEQTILCGMLQAGSLLSFDKLVADGVDPAYAEKLIQFGWETITEALKQGGITLMMDRLSNSAKLRAFALSEQLKGIMAPLFQKHMDDIISGAFSGGMMADWANDDVKLLTWREETGKTAFENAPQFEGKISEQEYFDHGVLMIAMVKAGVELAFETMVSAGIIEESAYYESLHELPLIANTIARKRLYEMNVVISDTAEYGNYLFANAAVPLLKETFMSSLQAGDLGKPVAAAGIDNSQLRDVNEAIRNHPIEVVGKKLRGYMTDMKRIAVAG

SEQ ID NO: 488 - protein, 492 aa, Dickeya zeae
MANYFNTLNLRQQLAQLGKCRFMNRDEFADEASYLKGKKVVIVGCGAQGLNQGLNMRDSGLDIAYALRAEAIAEKRASWRKATENGFKVGTYEELIPQADLVVNLTPDKQHSAVVQAVQPLMKQGAALGYSHGFNIVEVGEQVRKDLTVVMVAPKCPGTEVREEYKRGFGVPTLIAVHPENDPKGEGMAIAKAWAAATGGHRAGVLESSFVAEVKSDLMGEQTILCGMLQAGSLLSFDKLVADGVDPAYAEKLIQFGWETITEALKQGGITLMMDRLSNPAKLRAFALSEQLKGIMAPLFQKHMDDIISGAFSSGMMADWANDDVKLLTWREETGKTAFENAPQFEGKIDEQEYFDNGVLMIAMVKAGVELAFETMVSSGIIEESAYYESLHELPLIANTIARKRLYEMNVVISDTAEYGNYLFANAAVPLLKGAFMDSLQPGDLGKPVAANSVDNAQLRDVNEAIRNHPIETVGKKLRGYMTDMKRIAVAG

SEQ ID NO: 489 - protein, 492 aa, Aggregatibacter aphrophilus
MANYFNTLNLRQQLDQLGRCRFMDRSEFATEADFLKGKKIVIVGCGAQGLNQGLNMRDSGLDISYALRPEAIAEKRASFQRASENGFKVGTYEELIPTADLVINLTPDKQHSKVVADVMPLMKKGAALGYSHGLNIVEVGEQIRPDMTVVMVAPKCPGTEVREEYKRGFGVPTLIAVHPENDPQGEGLEIAKAWAAATGGHRAGVLESSFVAEVKSDLMGEQTILCGMLQAGSIICYDKLVADGKDPAYAGKLVQYGWETITEALKQGGITLMMDRLSNSAKLRAFELAEQIKEELAFLFAKHMDDIISGEFSRVMMEDWANGDANLLKWREETGKTAFENAPKYEGKISEQEYFDHGVLMIAMVKAGVELAFDTMVASGIYEESAYYESLHELPLIANTIARKRLYEMNVVISDTAEYGNYLFANVAGPIMQKALVPTLRKGDIGEPTPTVEIDNITLRDVNDEIRNHPVELIGQELRGYMKDMKRVSLQG

SEQ ID NO: 490 - protein, 492 aa, Pectobacterium carotovorum
MANYFNTLNLRQQLDQLGKCRFMGRDEFADEASYLKGKKVVIVGCGAQGLNQGLNMRDSGLDIAYALRAEAIAEKRASWRKATENGFTVGTYEDLIPQADLVVNLTPDKQHSAVVQAVQPLMKQGAALGYSHGFNIVEVGEQIRKDITVVMVAPKCPGTEVREEYKRGFGVPTLIAVHPENDPKGEGMAIAKAWAAATGGHRAGVLQSSFVAEVKSDLMGEQTILCGMLQAGSLLSFDKLVAEGTDPAYAEKLIQFGWETITEALKQGGITLMMDRLSNPAKLRAYALSEQLKGIMAPLFQKHMDDIISGEFSSGMMADWANDDVKLLTWREETGKTAFENAPQFDGKIAEQEYFDNGVLMVAMVKAGVELAFETMVSSGIIEESAYYESLHELPLIANTIARKRLYEMNVVISDTAEYGNYLFANAAVPLLKDAFMASLQPGDLGKAVAGTEVDNAQLRDVNEAIRNHPIETVGQTLRGYMKDMKRIAVAG

SEQ ID NO: 491 - protein, 492 aa, Photorhabdus asymbiotica
MANYFNTLNLRQQLAQLGKCRFMVREEFVDEAGYLKGKKVVIVGCGAQGLNQGLNMRDSGLDIAYALRKEAIDEKRASWRKATENGFQVGTYEELVPQADLVINLTPDKQHSSVVRAVQPLMKEGAALGYSHGLNIVEVGEQIRKDITVVMVAPKCPGTEVREEYKRGFGVPTLIAVHPENDPKGEGMAIAKAWAAATGGHRAGVLESSFVAEVKSDLMGEQTILCGMLQAGSLLCYDRLIEDGAEPGYAGKLIQFGWETITEALKQGGITLMMDRLPNPAKLRAYALSEQLKDIMTPLFQKHMDDIISGEFSSGMMADWANDDKKLLGWREETGNTQFENSPQYDGKISEQEYFDHGVLMVAMVKAGVELAFEVMVDTGIIAESAYYESLHELPLIANTISRKRLYEMNVVISDTAEYGNYLFSHVAVPLLKEKFMGSLQAGDLGKPIVESGIDNAQLRDVNEAIRNHPIEVVGRVLRGYMTDMKRISVGG

SEQ ID NO: 492 - protein, 492 aa, Fibrobacter succinogenes
MNYFNSIPMRRQLEEIGHCRFMEHSEFSRGVEALKGKKIVFVGCGAQGLHQGLDLRDSGLDVSYTLRKEAIEQKRQSWKNATENGFKVGTYEEMIPDADLVCNLTPDKQHHNVIPAIMKLMKKGAALSYSHGFNIVEEGQEIRKDITVIMVAPKGPGSEVRSEYLRGFGMPCLIAVHPENDPEGKGWDYAKAYAAGLHADRPGVLESSFVAEVKSDLMGEQTILCGMLQTGTILCYDKMVKEFGIDKAYAVKLLQYGWETISEALKHGGITNMMDRLSNPAKIRATELAEKMKKIMKPLYQEHQDNIISGKFSSTMMVDWEAGDKDLLKWRGETGELEFEKVAATDKQITEQEYFDRGVLMTAMIKAGVELAFETMCSVGIKPMSAYYESLHETPLIANLIARKKLFEMNRVISDTAEYGCYLFANKCVPLLADFMKNEVKKGDIGDIFNEGNTNAVDNEELIKVNKNIRQHPVEEVGAWLRDRMSGMTRVV

SEQ ID NO: 493 - protein, 492 aa, Pectobacterium wasabiae
MANYFNTLNLRQQLDQLGKCRFMGRDEFADEASYLKGKKVVIVGCGAQGLNQGLNMRDSGLDIAYALRAEAIAEKRASWRKATENGFTVGTYEDLIPQADLIVNLTPDKQHSAVVQAVQPLMKQGAALGYSHGFNIVEVGEQIRKDITVVMVAPKCPGTEVREEYKRGFGVPTLIAVHPENDPKGEGMAIAKAWAAATGGHRAGVLQSSFVAEVKSDLMGEQTILCGMLQAGSLLGFDKLVAEGTDPAYAEKLIQFGWETITEALKQGGITLMMDRLSNPAKLRAYALSEQLKGIMAPLFQKHMDDIISGEFSGGMMADWANDDVKLLTWREETGKTAFENAPQFDGKIAEQEYFDNGVLMVAMVKAGVELAFETMVSSGIIEESAYYESLHELPLIANTIARKRLYEMNVVISDTAEYGNYLFANAAVPLLKGAFMASLQPGDLGKAVAGTEVDNAQLRDVNEAIRNHPIETVGHTLRGYMKDMKRIAVAG

SEQ ID NO: 494 - protein, 492 aa, Edwardsiella tarda
MTNYFNTLNLRQQLAQLGKCRFMARAEFADGVNALRGKKVVIVGCGAQGLNQGLNMRDSGLDVAYALRAEAIAERRDSYRRATEHGFSVGDYQTLIPQADLVINLTPDKQHAAVVSAVQPLMKQGAALGYSHGFNIVEVGQQIRPDITVVMVAPKCPGTEVREEYKRGFGVPTLIAVHPENDPRGEGMAIAKAWASATGGDRAGVLVSSFVAEVKSDLMGEQTILCGMLQTGSLLCYERLVAEGADPAWAGKLIQFGWETITEALKQGGITLMMDRLSNPAKLRAYALAEQLKTLMAPLFAKHMDDILSGAFSQGMMADWAADDDHLLTWRAETGESAFEKAPPFEGKIDEQTYFDRGVLLVAMVKAGVELAFETMVASGIVAESAYYESLHELPLIANTIARRRLYEMNVVISDTAEYGNYLFANAAVPLLRQAFMATLQPGDLGQSLPAEAVDNAALREVNQAIRQHPIETVGERLRGYMTDMKRVAVAG

SEQ ID NO: 495 - protein, 492 aa, Dickeya dadantii
MANYFNTLNLRQQLAQLGKCRFMGRDEFADEASYLKGKKVVIVGCGAQGLNQGLNMRDSGLDIAYALRAEAIAEKRASWRKATENGFKVGTYEELIPQADLVVNLTPDKQHSAVVQAVQPLMKQGAALGYSHGFNIVEVGEQVRKDLTVVMVAPKCPGTEVREEYKRGFGVPTLIAVHPENDPKGEGMAIAKAWAAATGGHRAGVLESSFVAEVKSDLMGEQTILCGMLQAGSLLSFDKLVADGVDPAYAEKLIQFGWETITEALKQGGITLMMDRLSNPAKLRAFALSEQLKGIMAPLFQKHMDDIISGEFSSGMMADWANDDVKLLTWREETGKTAFENAPQFEGKIAEQEYFDNGVLMIAMVKAGVELAFETMVSSGIIEESAYYESLHELPLIANTIARKRLYEMNVVISDTAEYGNYLFANAAVPLLKGAFMDSLQPGDLGKPVAATSVDNAQLRDVNEAIRHHPIEVVGKKLRGYMTDMKRIAVAG

SEQ ID NO: 496 - protein, 492 aa, Xenorhabdus bovienii
MANYFDTLNLRQQLAQLGKCRFMAREEFADEAGYLKGKKVVIVGCGAQGLNQGLNMRDSGLNIAYALRQEAIEEKRASWRKATENGFKVGTYEELIPQADLVINLTPDKQHSTVVQAVQPLMKEGAALGYSHGFNIVEVGELVRKDITVVMVAPKCPGTEVREEYKRGFGVPTLIAVHPENDVKGEGMAIAKAWAAATGAHRAGVLESSFVAEVKSDLMGEQTILCGMLQAGSLLCYDKLVAEGTEPGYAGKLIQFGWETITEALKQGGITLMMDRLSNSAKLRAYALSEQLKVILAPLFQKHMDDIISGTFSSTMMADWANDDKNLLTWRAETGQTPFENYPDHSGNISEQEYFDHGVLMIAMVKAGVELAFETMVDAGIIEESAYYESLHELPLIANTIARKRLYEMNVVISDTAEYGNYLFSHVAVPLLKEKFMATLQAGDMGKPVADGSIDNAQLRDVNEAIRHHPIETIGRTLRGYMTDMQRIAVGG

SEQ ID NO: 497 - protein, 492 aa, Erwinia amylovora
MANYFNTLNLRNQLAQLGKCRFMAREEFADEASYLKGKKVVIVGCGAQGLNQGLNMRDSGLDIAYALRAEAIAEKRASWRKATENGFKVGTYEELIPQADLVVNLTPDKQHTSVVQAVQPLMKDGAALGYSHGFNIVEVGEQVRKDVTVVMVAPKCPGTEVREEYKRGFGVPTLIAVHPENDPKGEGMAIAKAWAAATGGHRAGVLESSFVAEVKSDLMGEQTILCGMLQAGSLLCFDKLVAEGTDAAYAEKLIQFGWETITEALKQGGITLMMDRLSNPAKLRAYALSEQLKTIMAPLFQKHMDDIISGEFSSGMMADWANDDKKLLGWREETGKTAFETAAQFEGKIGEQDYFDQGVVMIAMVKAGVELAFETMVAAGIVEESAYYESLHELPLIANTIARKRLYEMNVVISDTAEYGNYLFSYAAVPLLKEFMTTLQAGDLGKQVNTSTSVDNAQLRDVNEAIRHHDIETVGRKLRGYMTDMKRIAVAG

SEQ ID NO: 498 - protein, 492 aa, Xenorhabdus nematophila
MANYFDTLNLRQQLAQLGKCRFMAREEFADEAGYLKGKKVVIVGCGAQGLNQGLNMRDSGLDIAYALRKEAIEEKRASWRKATENGFRVGTYEELIPQADLVINLTPDKQHSSVVRAVQPLMKEGAALGYSHGFNIVEVGEQIRKDITVVMVAPKCPGTEVREEYKRGFGVPTLIAVHPENDVKGEGMAIAKAWVAATGGHRAGVLESSFVAEVKSDLMGEQTILCGMLQAGSLLCYDKLVADGAEPSYAGKLIQFGWETITEALKQGGITLMMDRLSNSAKLRAYALAEQLKTLLAPLFQKHMDDIISGAFSSTMMADWANDDKNLLTWREETGKTPFENYPDYSGNISEQEYFDHGVLMIAMVKAGVELAFDTMIDAGIIEESAYYESLHELPLIANTIARKRLYEMNVVISDTAEYGNYLFSHIAVPLLKEKFMATLQAGDLGKEVADSGIDNAQLRDVNEAIRHHPIETIGHTLRGYMTDMKRIAVGG

SEQ ID NO: 499 - protein, 492 aa, Erwinia billingiae
MANYFNTLNLRNQLAQLGKCRFMSREEFADEASYLKGKKVVIVGCGAQGLNQGLNMRDSGLDIAYALRAEAIAEKRASWRKATENGFKVGTYEELIPQADLVVNLTPDKQHTSVVQAVQPLMKDGAALGYSHGFNIVEVGEQVRKDITVVMVAPKCPGTEVREEYKRGFGVPTLIAVHPENDPKGEGMAIAKAWAAATGGHRAGVLESSFVAEVKSDLMGEQTILCGMLQAGSLLCFDKLVAEGTDPAYAEKLIQFGWETVTEALKQGGITLMMDRLSNPAKVRAYALSEQLKTIMAPLFQKHMDDIISGEFSSGMMADWANDDKKLLGWREETGKTAFETASQFEGKIAEQTYFDEGVVMIAMVKAGVELAFETMVDAGIIEESAYYESLHELPLIANTIARKRLYEMNVVISDTAEYGNYLFSYAAVPLLKEFMTTLQAGDLGKSQATSTAIDNAQLRDVNEAIRHHPIEAVGSKLRGYMTDMKRIAVAG

SEQ ID NO: 500 - protein, 492 aa, Dickeya dadantii
MANYFNTLNLRQQLAQLGKCRFMGRDEFADEASYLKGKKVVIVGCGAQGLNQGLNMRDSGLDIAYALRAEAIAEKRASWRKATENGFKVGTYEELIPQADLVVNLTPDKQHSAVVQAVQPLMKQGAALGYSHGFNIVEVGEQVRKDLTVVMVAPKCPGTEVREEYKRGFGVPTLIAVHPENDPKGEGMAIAKAWAAATGGHRAGVLESSFVAEVKSDLMGEQTILCGMLQAGSLLSFDKLVAEGTDPAYAEKLIQFGWETITEALKQGGITLMLDRLSNPAKLRAFALSEQLKGIMAPLFQKHMDDIISGAFSSGMMADWANDDVKLLTWREETGKTAFENASQFEGKIAEQEYFDHGVLMIAMVKAGVELAFETMVSSGIIEESAYYESLHELPLIANTIARKRLYEMNVVISDTAEYGNYLFANAAVPLLKGAFMDSLQPGDLGKPVAATGVDNAQLRDVNDAIRNHPIEVIGKKLRGYMTDMKRIAVAG

SEQ ID NO: 501 - protein, 492 aa, Paludibacter propionicigenes
MANYFSSLPHRLKVQELGKCDFMQSSEFADGVKKLIGKKIVVVGCGAQGLAQGLNMRDSGLDISYALRQVAIDQKRASYENAKNNNFVVGSFEELIPTADLVMNLAPDKQHTSVVNQVMPLMKKGACLSYSHGFNIVEEGTQIRKDITVIMVAPKSPASEVRAEYLRGFGVPTLIAVHPENDPNGDGLEIAKAYCVGTGGHKAGVLHSSFVAEVKSDLMGEQTILCGLLQTGSILSFNKMVEKGIDPAYASKLVQYGWETITEALKIGGITNMMDRLSNPAKIEAFKLAEELKDIMRPLFIKHMDDILSGEFSKTMMEDWAAGDKNLLTWRAETGETAFEKTPAGDVEISEQEYFDNATLMVAFIKAGVESAYETMTCSGIKNESAYYESLHETPLIANTIARKKLFEMNRVISDTAEYGCYLFDHACKPLLADFMKKIDTNVIGKNFNASSNGRVDNFELVKVNAAIRNHSIEICGAELRAAMTAMKKIVE

SEQ ID NO: 502 - protein, 492 aa, Haemophilus influenzae
MANYFNTLNLRQKLDQLGRCRFMDREEFADEANFLKGKKIVIVGCGAQGLNQGLNMRDSGLDISYALRPEAIAEKRASFQRATENGFKVGTYEELIPTADLVVNLTPDKQHSKVVADVMPLMKKDSAFGYSHGFNIVEVGEEIRKDITVVMVAPKCPGTEVREEYKRGFGVPTLIAVHPENDPKGEGMAIAKAWAAATGGHKAGVLESSFVAEVKSDLMGEQTILCGMLQAGSIVCYDKLVADGKDPAYAGKLIQYGWETITEALKQGGISLMMDRLSNSAKLRAFELAEQIKESLGFLYYKHMDDIISGHFSATMMADWANGDKDLFAWREATGKTAFENAPKYDGKISEQEYFDNGVLMIAMVKAGVELAFEAMVASGIYEESAYYESLHELPLIANTIARKRLYEMNVVISDTAEYGNYLFSNVATPILAKEIIPNLQKGDLGEPTPAVEVDNITLRDVNDAIRNHPVELIGQELRGYMTDMKRIAVAG

SEQ ID NO: 503 - protein, 492 aa, Yersinia enterocolitica
MANYFNTLNLRQQLAQLGKCRFMARDEFADEANYLKGKKVVIVGCGAQGLNQGLNMRDSGLDVAYALRKEAITEKRASWRKATENGFKVGTYEELIPQADLVVNLTPDKQHSAVVQAVQPLMKDGAALGYSHGFNIVEVGEQVRKDITVVMVAPKCPGTEVREEYKRGFGVPTLIAVHPENDPKGEGMAIAKAWAAATGGHRAGVLESSFVAEVKSDLMGEQTILCGMLQAGSLLCFDKLVSEGTNAAYAEKLIQFGWETITEALKQGGITLMMDRLSNPAKLRAYALSEQLKEIMAPLFQKHMDDIISGEFSSGMMADWANDDKKLLNWREETGKTAFENAPQFEGKISEQEYFDHGVLMIAMVKAGVELAFETMVDSGIIEESAYYESLHELPLIANTIARKRLYEMNVVISDTAEYGNYLFANAAVPLLKGKFMDSLQTGDLGKSVAGTAVDNAQLRDVNEAIRNHPIEAVGHKLRGYMTDMKRIAVAG

SEQ ID NO: 504 - protein, 492 aa, Treponema succinifaciens
MGNNYFNSIPWREARLQLGHCRSMAKEEFADGVNALKGKKIVIVGCGAQGLNQGLCLRDSGLDVSYALRESAIAEKRQSWKNATENGFKVGTYDELIPTADLVGNLTPDKQHTAVITEVMKRMKKGSALWYSHGFNMIEEGMQIRPDITVVMCAPKGPGTEVWHEFQRGFGVPDLIAVHPVNDPEKKGWAYAKALAVGMGGSKAGVLESSFVAEVKSDLMGEQTILCGMLQAGTIVCFDKMVSEGIAPEYATKLLMHGWNVISEALKWGGITNMMDRLSNPAKIRANELSKEIKKLLTPLYQKHMDDIISGKFSSTMMQDWANKDHDLLTWREETGKLPFESTPESKEEITEQEYFDKGILLVAMVKAGCELAFETMVDAGIKPESAYYESLHEVPLIANLIDRKRLYEMNRVISDTAEYGCYLFSRVAAPMMAKELMPKLHTDVIGKGLELKDTSVNNTQLVEVNAEIRNHPIEVVGRKLREYMTAMKPVL

SEQ ID NO: 505 - protein, 492 aa, Alteromonas macleodii
MANYFNTLSLRQQLDQLGRCRFMARDEFADGCQFLKGKKIVIVGCGAQGLNQGLNMRDSGLDVSYALRQAAIDEQRDSYKRASSNGFTVGTYQQLIPEADVVYNLTPDKQHASVVEAVMPLMKKGATLGYSHGFNIVEEGQQIRSDITVIMCAPKSPGSEVREEYKRGFGVPTLIAVHPENDPEGKGWDQAKALASATGGDRAGVLESSFVAEVKSDLMGEQTILCGMQQVAAVLAFEKMVDDGIDPGYAGALIQYGLEAITEALKIGGVTNMMDRLSNPAKVKAFELSEQLTDLLRPLFEKHQDDIISGEFSRTMMEDWANGDANLLKWREETGETAFENAPAYEGEISEQEFFDHGILLVAMIKCGVEVAFDVMVEAGILPESAYYESLHETPLISNTIARKRLYEMNVVISDTAEYGNYLFANAAIPILREKFMPTIDTSVIGKGLTAASNQVENKRLVEINEAIRSHGVESVGKTLRGYMTDMKAIVV

SEQ ID NO: 506 - protein, 492 aa, Alteromonas macleodii
MANYFNTLSLRQQLDQLGRCRFMARDEFADGCQFLKGKKVVIVGCGAQGLNQGLNMRDSGLDVSYALRQAAIDEQRDSYKRASSNGFTVGTYQQLIPEADVVYNLTPDKQHASVVEAVMPLMKKGATLGYSHGFNIVEEGQQIRSDITVIMCAPKSPGSEVREEYKRGFGVPTLIAVHPENDPEGKGWDQAKALASATGGDRAGVLESSFVAEVKSDLMGEQTILCGMQQVAAVLAFEKMVDDGIDPGYAGALIQYGLEAITEALKIGGVTNMMDRLSNPAKVKAFELSEQLTDLLRPLFEKHQDDIISGEFSRTMMEDWANGDANLLKWREETGETAFENAPAYEGEISEQEFFDHGILLVAMIKCGVEVAFDVMVEAGILPESAYYESLHETPLISNTIARKRLYEMNVVISDTAEYGNYLFANAAIPILREKFMPTIDTTVIGKGLTAASNQVENKRLVEINEAIRSHGVESVGKTLRGYMTDMKAIVV

SEQ ID NO: 507 - protein, 492 aa, Alteromonas sp.
MANYFNTLSLRQQLDQLGRCRFMAREEFADGCQFLKGKKIVIVGCGAQGLNQGLNMRDSGLDVSYALRQAAIEEQRDSYKRATSNGFTVGTYQELIPSADLVYNLTPDKQHASVVEAVMPLMQKGATLGYSHGFNIVEEGQQIRSDITVVMCAPKCPGTEVREEYKRGFGVPTLIAVHPENDPENKGWDTAKALASATGGDRAGVLESSFVAEVKSDLMGEQTILCGMQQVAAVLAFEKMTADGIDAAYAGALIQFGLEAVTEALKIGGVTNMMDRLSNPAKVKAYDLSEQLTDLLRPLFEKHQDDIISGEFSRTMMEDWANGDANLLRWREETGETGFENAPVYEGEISEQEFFDHGILLVAMIKCGVEVAFDVMVEAGILPESAYYESLHETPLISNTIARKRLYEMNVVISDTAEYGNYLFANAAIPILREKFMPTIDTSVIGKGLSETSNQVENKRLVDINEAIRTHGVEQVGKTLRGYMTDMKAIIG

SEQ ID NO: 508 - protein, 492 aa, Pectobacterium atrosepticum
MANYFNTLNLRQQLDQLGKCRFMGRDEFADEASYLKGKKVVIVGCGAQGLNQGLNMRDSGLDIAYALRAEAIAEKRASWRKATENGFTVGTYEDLIPQADLIVNLTPDKQHSAVVQAVQPLMKQGAALGYSHGFNIVEVGEQIRKDITVVMVAPKCPGTEVREEYKRGFGVPTLIAVHPENDPKGEGMAIAKAWAAATGGHRAGVLQSSFVAEVKSDLMGEQTILCGMLQAGSLLGFDKLVSEGTDPAYAEKLIQFGWETITEALKQGGITLMMDRLSNPAKLRAYALSEQLKGIMAPLFQKHMDDIISGEFSGGMMADWANDDVKLLTWREETGKTAFENAPQFDGKIAEQEYFDNGVLMVAMVKAGVELAFETMVSSGIIEESAYYESLHELPLIANTIARKRLYEMNVVISDTAEYGNYLFANAAVPLLKGAFMASLQPGDLGKAVAGTEVDNAQLRDVNEAIRNHPIETVGHTLRGYMKDMKRIAVAG

SEQ ID NO: 509 - protein, 492 aa, Yersinia pseudotuberculosis
MANYFNTLNLRQQLAQLGKCRFMARDEFADEAGYLKGKKVVIVGCGAQGLNQGLNMRDSGLDVAYALRKEAIAEKRASWRKATENGFKVGTYEELIPQADLVVNLTPDKQHSAVVKAVQPLMKEGAALGYSHGFNIVEVGEQVRKDITVVMVAPKCPGTEVREEYKRGFGVPTLIAVHPENDPKGEGMAIAKAWAAATGGHRAGVLESSFVAEVKSDLMGEQTILCGMLQAGSLLCFDKLVSEGTDAAYAEKLIQFGWETITEALKQGGITLMMDRLSNPAKLRAYALSEQLKEIMAPLFQKHMDDIISGAFSSGMMADWANDDVKLLNWREETGRTAFENAPQFEGKISEQEYFDHGVLMIAMVKAGVELAFETMVDSGIIEESAYYESLHELPLIANTIARKRLYEMNVVISDTAEYGNYLFANAAVPLLKEKFMDSLQAGDLGKSIPGSAVDNAQLRDVNEAIRNHPIEAVGHKLRGYMTDMKRIAVAG

SEQ ID NO: 510 - protein, 492 aa, Haemophilus influenzae
MANYFNTLNLRQKLDQLGRCRFMDREEFADEANFLKGKKIVIVGCGAQGLNQGLNMRDSGLDISYALRPEAIAEKRASFQRATENGFKVGTYEELIPTADLVVNLTPDKQHSKVVADVMPLMKKDSAFGYSHGFNIVEVGEEIRKDITVVMVAPKCPGTEVREEYKRGFGVPTLIAVHPENDPKGEGLAIAKAWAAATGGHKAGVLESSFVAEVKSDLMGEQTILCGMLQAGSIVCYDKLVADGKDPAYAGKLIQYGWETITEALKQGGITLMMDRLSNSAKLRAFELAEQIKESLGFLYYKHMDDIISGHFSATMMADWANGDKDLFAWREATGKTAFENAPKYDGKISEQEYFDNGVLMIAMVKAGVELAFDAMVASGIYEESAYYESLHELPLIANTIARKRLYEMNVVISDTAEYGNYLFSNVATPILAKEIIPNLQKGDLGEPTPAVEIDNITLRDVNDAIRNHPVELIGQELRGYMTDMKRIAVAG

SEQ ID NO: 511 - protein, 492 aa, Sodalis glossinidius
MANYFNTLNLRQQLAQLGKCRFMSRDEFVDEADYLKGKKVVIIGCGAQGLNQGLNMRDSGLDIAYALRKEAIAEKRPSWRKATENGFRVGTYEELVPEAGLVVNLTPDKQHSAVVQAVQPLMKQGAALGYSHGFNIVEVGEQIRHDITVIMVAPKCPGTEVREEYKRGFGVPTLIAVHPENDPKGEGMTLAKAWAAATGGHRAGVLESSFVAEVKSDLMGEQTILCGMLQAGSLLCFDKMVADGVDPAYAGKLIQFGWETTTEALKQGGITLMMDRLSNSAKLRAYALSEQLKQLMQPLFEKHMDDIITGAFSSGMMADWANGDVKLLGWREETGRSPFENAPQFDGKISEQTYFDHGVLMIAMAKAGVELAFETMTRSGIIAESAYYESLHELPLIANTVARKRLYEMNVVISDTAEYGNYLFANAAVPLLKEAFMGNLQVGDLGKPVADGEIDNARLRDVNEAIRQHPIEIVGAELRGYMKDMKRIAVAN

SEQ ID NO: 512 - protein, 492 aa, Shewanella denitrificans
MANYFNSLNLRQQLAQLAQCRFMDQGEFAQGCEHLKGWNIVILGCGAQGLNQGLNMRDSGLNIAFALRSAAISERRASWQKATDNGFRVGTFEALIPDADLVLNLTPDKQHSNVVNTIMPLMKQGATLSYSHGFNIVEEGMQVRKDLTVIMVAPKCPGTEVREEYKRGFGVPTLIAVHPENDPNGDGLVIAKAYASATGGDRAGVLLSSFVAEVKSDLMGEQTILCGMLQTGAILGYEKMVSDGVEPGFAAKLIQQGWETVTEALKHGGITHMMDRLSNPAKIKAFDTAEELKVLLKPLFEKHMDDIISGEFSRNMMADWANDDANLLRWRAETSDTGFENAPKSQEPIDEQDYFDKGIFLVAMIKAGVELAFDTMVAAGIVEESAYYESLHETPLIANTIARKRLYEMNVVISDTAEYGCYLFNHAAVPLLKDYVNAMPAELLGKGLGNISNKVDNQKLIQVNQAVRHTGVEQVGAKLRGYMTQMKDIAAS

SEQ ID NO: 513 - protein, 492 aa, Cytophaga hutchinsonii; identical to SEQ ID NO: 91

SEQ ID NO: 514 - protein, 492 aa, Shewanella sp.; identical to SEQ ID NO: 88

SEQ ID NO: 515 - protein, 492 aa, Shewanella sp.
MANYFNSLNLRQQLEQLGQCRFMDRSEFSDGCNYIKDWNIVILGCGAQGLNQGLNMRDSGLNIAYALRPEAIAQKRASWQKATDNGFKVGTFEELIPTADLVLNLTPDKQHSNVVSAVMPLMKQGATLSYSHGFNIVEEGMQIRPDITVVMVAPKCPGTEVREEYKRGFGVPTLIAVHPENDPNGDGLEIAKAYASATGGDRAGVLQSSFIAEVKSDLMGEQTILCGMLQTGAILGYDKMVADGVEPGYAAKLIQQGWETVTEALKHGGITNMMDRLSNPAKIKAFEIAEDLKEILQPLFEKHMDDIISGEFSRTMMQDWANDDANLLRWRAETAETGFENAPVSSEHIDEQTYFDKGIFLVAMIKAGVELAFDTMVSAGIVEESAYYESLHETPLIANTIARKRLYEMNVVISDTAEYGCYLFNHAAVPMLRDYVNAMSPEYLGAGLKDGSNNVDNLQLIAINDAIRHTSVEYIGAELRGYMTDMKSIVGA

SEQ ID NO: 516 - protein, 492 aa, Shewanella sp.
MANYFNSLNLRQQLAQLGQCRFMDRSEFSDGCNYIKDWNIVILGCGAQGLNQGLNMRDSGLNIAYALRPEAIAQKRASWQKATDNGFKVGTFEELIPTADLVLNLTPDKQHSNVVSAVMPLMKQGATLSYSHGFNIVEEGMQIRPDITVVMVAPKCPGTEVREEYKRGFGVPTLIAVHPENDPNGDGLEIAKAYASATGGDRAGVLQSSFIAEVKSDLMGEQTILCGMLQTGAILGYDKMVADGVEPGYAAKLIQQGWETVTEALKHGGITNMMDRLSNPAKIKAFEIAEDLKEILQPLFEKHMDDIISGEFSRTMMQDWANDDANLLRWRAETAETGFENAPVSSEHIDEQTYFDKGIFLVAMIKAGVELAFDTMVSAGIVEESAYYESLHETPLIANTIARKRLYEMNVVISDTAEYGCYLFNHAAVPMLRDYVNAMSPEYLGAGLKDSSNNVDNLQLIAINDAIRHTSVEYIGAELRGYMTDMKSIVGA

SEQ ID NO: 517 - protein, 492 aa, Shewanella sp.
MANYFNSLNLRQQLAQLGQCRFMDRSEFTDGCNYIKDWNIVILGCGAQGLNQGLNMRDSGLNISYALRHEAIEQKRASWQKATDNGFRVGTFEELIPTADLVLNLTPDKQHSNVVNAVMPLMKQGATLSYSHGFNIVEEGMQVRPDITVIMVAPKCPGTEVREEYKRGFGVPTLIAVHPENDPKGDGLEIAKAYASATGGDRAGVLLSSFIAEVKSDLMGEQTILCGMLQTGAILGYEKMVADGVEPGYAAKLIQQGWETVTEALKHGGITNMMDRLSNPAKIKAFEIAEDLKEILQPLFEKHMDDIISGEFSRTMMEDWANDDANLLRWRAETGETGFENAPVSSEHIDEQTYFDKGIFLVAMIKAGVELAFDTMVSAGIVEESAYYESLHETPLIANTIARKRLYEMNVVISDTAEYGCYLFNHAAVPMLRDYVNAMSPEYLGAGLKDSSNSVDNLQLIAINDAIRHTAVEYVGAELRGYMTDMKSIVGA

SEQ ID NO: 518 - protein, 492 aa, Haemophilus influenzae
MANYFNTLNLRQKLDQLGRCRFMDREEFADEANFLKGKKIVIVGCGAQGLNQGLNMRDSGLDISYALRPEAIAEKRASFQRATENGFKVGTYEELIPTADLVVNLTPDKQHSKVVVDVMPLMKKDSAFGYSHGFNIVEVGEEIRKDITVVMVAPKCPGTEVREEYKRGFGVPTLIAVHPENDPKGEGMAIAKAWAAATGGHKAGVLESSFVAEVKSDLMGEQTILCGMLQAGSIVCYDKLVADGKDPAYAGKLIQYGWETITEALKQGGITLMMDRLSNSAKLRAFELAEQIKESLGFLYYKHMDDIISGHFSATMMADWANGDKDLFAWREATGKTAFENAPKYDGKISEQEYFDNGVLMIAMVKAGVELAFEAMVASGIYEESAYYESLHELPLIANTIARKRLYEMNVVISDTAEYGNYLFSNVATPILAKEIIPNLQKGDLGEPTPAVEVDNITLRDVNDAIRNHPVELIGQELRGYMTDMKRIAVAG

SEQ ID NO: 519 - protein, 492 aa, Haemophilus influenzae
MANYFNTLNLRQKLDQLGRCRFMDREEFADEANFLKGKKIVIVGCGAQGLNQGLNMRDSGLDISYALRPEAIAEKRASFQRATENGFKVGTYEELIPTADLVVNLTPDKQHSKVVADVMPLMKKDSAFGYSHGFNIVEVGEEIRKDITVVMVAPKCPGTEVREEYKRGFGVPTLIAVHPENDPKGEGMAISKAWAAATGGHKAGVLESSFVAEVKSDLMGEQTILCGMLQAGSIVCYDKLVADGKDPAYAGKLIQYGWETITEALKQGGITLMMDRLSNSAKLRAFELAEQIKESLGFLYYKHMDDIISGHFSATMMADWANGDKDLFAWREATGKTAFENAPKYDGKISEQEYFDNGVLMIAMVKAGVELAFDAMVASGIYEESAYYESLHELPLIANTIARKRLYEMNVVISDTAEYGNYLFSNVATPILAKEIIPNLQKGDLGEPTPAVEVDNITLRDVNDAIRNHPVELIGQELRGYMTDMKRIAVAG

SEQ ID NO: 520 - protein, 492 aa, Haemophilus influenzae
MANYFNTLNLRQKLDQLGRCRFMDREEFADEANFLKGKKIVIVGCGAQGLNQGLNMRDSGLDISYALRPEAIAEKRASFQRATENGFKVGTYEELIPTADLVVNLTPDKQHSKVVADVMPLMKKDSAFGYSHGFNIVEVGEEIRKDITVVMVAPKCPGTEVREEYKRGFGVPTLIAVHPENDPKGEGMAIAKAWAAATGGHKAGVLESSFVAEVKSDLMGEQTILCGMLQAGSIVCYDKLVADGKDPAYAGKLIQYGWETITEALKQGGITLMMDRLSNSAKLRAFELAEQIKESLGFLYYKHMDDIISGHFSATMMADWANGDKDLFAWREATGKTAFENAPKYDGKISEQEYFDNGVLMIAMVKAGVELAFEAMVASGIYEESAYYESLHELPLIANTIARKRLYEMNVVISDTAEYGNYLFSNVATPILAKEIIPNLQKGDLGEPTPAVEVDNITLRDVNDAIRNHPVELIGQELRGYMTDMKRIAVAG

SEQ ID NO: 521 - protein, 492 aa, Pectobacterium carotovorum
MANYFNTLNLRQQLDQLGKCRFMGRDEFADEASYLKGKKVVIVGCGAQGLNQGLNMRDSGLDIAYALRAEAIAEKRASWRKATENGFTVGTYEDLIPQADLVVNLTPDKQHSAVVQAVQPLMKQGAALGYSHGFNIVEVGEQIRKDITVVMVAPKCPGTEVREEYKRGFGVPTLIAVHPENDPKGEGMAIAKAWAAATGGHRAGVLQSSFVAEVKSDLMGEQTILCGMLQAGSLLSFDKLVAEGTDPAYAEKLIQFGWETITEALKQGGITLMMDRLSNPAKLRAYALSEQLKGIMAPLFQKHMDDIISGEFSSGMMADWANDDVKLLTWREETGKTAFENAPQFDGKIAEQEYFDNGVLMVAMVKAGVELAFETMVSSGIIEESAYYESLHELPLIANTIARKRLYEMNVVISDTAEYGNYLFANAAVPLLKDAFMASLQPGDLGKAVAGTEVDNAQLRDVNEAIRNHPIETVGHTLRGYMKDMKRIAVAG

SEQ ID NO: 522 - protein, 492 aa, Yersinia rohdei
MANYFNTLNLRQQLAQLGKCRFMARDEFADEAGYLKGKKVVIVGCGAQGLNQGLNMRDSGLDVAYALRKEAIAEKRASWRKATENGFKVGTYEELIPQADLVVNLTPDKQHSAVVQAVQPLMKDGAALGYSHGFNIVEVGEQVRKDITVVMVAPKCPGTEVREEYKRGFGVPTLIAVHPENDPKGEGMAIAKAWAAATGGHRAGVLESSFVAEVKSDLMGEQTILCGMLQAGSLLCFDKLVSEGTDAAYAEKLVQFGWETITEALKQGGITLMMDRLSNPAKLRAYALSEQLKGIMAPLFQKHMDDIISGAFSSGMMADWAEDDVKLLNWREETGKTAFENAPQYEGKISEQEYFDHGVLMIAMVKAGVELAFETMVDSGIIEESAYYESLHELPLIANTIARKRLYEMNVVISDTAEYGNYLFANAAVPLLKGKFMDSLQAGDLGKSIAGTAVDNAQLRDVNEAIRNHPIEAVGHKLRGYMTDMKRIAVAG

SEQ ID NO: 523 - protein, 492 aa, Yersinia aldovae
MANYFNTLNLRQQLAQLGQCRFMTRDEFADEAGYLKGKKVVIVGCGAQGLNQGLNMRDSGLDVAYALRKEAIAEKRASWRKATENGFKVGTYEELIPQADLVVNLTPDKQHSAVVKAVQPLMKEGAALGYSHGFNIVEVGEQVRKDITVVMVAPKCPGTEVREEYKRGFGVPTLIAVHPENDPKGEGMAIAKAWAAATGGHRAGVLESSFVAEVKSDLMGEQTILCGMLQAGSLLCFDKLVSEGTDAAYAEKLVQFGWETITEALKQGGITLMMDRLSNPAKLRAYALSEQLKAIMAPLFQKHMDDIISGAFSSGMMADWAEDDVKLLNWREETGRTAFENAPQFEGKISEQEYFDHGVLMIAMVKAGVELAFETMVDSGIIEESAYYESLHELPLIANTIARKRLYEMNVVISDTAEYGNYLFANAAVPLLKGKFMDSLQAGDLGKSVAGTAVDNAQLRDVNEAIRNHPIEAVGHKLRGYMTDMKRIAVAG

SEQ ID NO: 524 - protein, 492 aa, Yersinia kristensenii
MANYFNTLNLRQQLAQLGKCRFMARDEFADEANYLKGKKVVIVGCGAQGLNQGLNMRDSGLDVAYALRKEAIAEKRASWRKATENGFKVGTYEELIPQADLVVNLTPDKQHSAVVQAVQPLMKDGAALGYSHGFNIVEVGEQVRKDITVVMVAPKCPGTEVREEYKRGFGVPTLIAVHPENDPKGEGMAIAKAWAAATGGHRAGVLESSFVAEVKSDLMGEQTILCGMLQAGSLLCFDKLVSEGTDAAYAEKLIQFGWETITEALKQGGITLMMDRLSNPAKLRAYALSEQLKEIMAPLFQKHMDDIISGAFSSGMMADWAEDDVKLLNWREETGKTAFENAPQFEGKISEQEYFDHGVLMIAMVKAGVELAFETMVDSGIIEESAYYESLHELPLIANTIARKRLYEMNVVISDTAEYGNYLFANAAVPLLKGKFMDSLQAGDLGKSVAGTAVDNAQLRDVNEAIRNHPIEAVGHKLRGYMTDMKRIAVAG

SEQ ID NO: 525 - protein, 492 aa, Yersinia frederiksenii
MANYFNTLNLRQQLAQLGKCRFMARDEFADEAGYLKGKKVVIVGCGAQGLNQGLNMRDSGLDVAYALRKEAIAEKRASWRKATENGFKVGTYEELIPQADLVVNLTPDKQHSAVVQAIQPLMKDGAALGYSHGFNIVEVGEQVRKDITVVMVAPKCPGTEVREEYKRGFGVPTLIAVHPENDPKGEGMAIAKAWAAATGGHRAGVLESSFVAEVKSDLMGEQTILCGMLQAGSLLCFDKLVSEGTDAAYAEKLIQFGWETITEALKQGGITLMMDRLSNPAKLRAYALSEQLKEIMAPLFQKHMDDIISGAFSSGMMADWAEDDVKLLNWREETGRTAFENAPQYEGKISEQEYFDHGVLMIAMVKAGVELAFETMVDSGIIEESAYYESLHELPLIANTIARKRLYEMNVVISDTAEYGNYLFANAAVPLLKGKFMDSLQAGDLGKSIAGTAVDNAQLRDVNEAIRNHPIEAVGHKLRGYMTDMKRIAVAG

SEQ ID NO: 526 - protein, 492 aa, Yersinia intermedia
MANYFNTLNLRQQLAQLGKCRFMARDEFADEASYLKGKKVVIVGCGAQGLNQGLNMRDSGLDVAYALRKEAIAEKRASWRKATENGFKVGTYEDLIPQADLVVNLTPDKQHSAVVQAVQPLMKDGAALGYSHGFNIVEVGEQVRKDITVVMVAPKCPGTEVREEYKRGFGVPTLIAVHPENDPKGEGMAIAKAWAAATGGHRAGVLESSFVAEVKSDLMGEQTILCGMLQAGSLLCFDKLVSEGTDAAYAEKLIQFGWETITEALKQGGITLMMDRLSNPAKLRAYALSEQLKEIMAPLFQKHMDDIISGAFSSGMMADWAQDDVKLLNWREETGRTAFENAPQFDGKISEQEYFDHGVLMIAMVKAGVELAFETMVDSGIIEESAYYESLHELPLIANTIARKRLYEMNVVISDTAEYGNYLFANAAVPLLKGKFMDSLQAGDLGKSVAGTAVDNAQLRDVNEAIRNHPIEAVGHKLRGYMTDMKRIAVAG

SEQ ID NO: 527 - protein, 492 aa, Unknown
  gamma proteobacterium
MSNYFNSLPLRIQLQELGKCRFMAPSEFSEGVEPIKDKKIVIVGCGAQGLNQGLNLRDSGLDVSFALRAAAISEQRDSWKRATENGFTVGTYEELIPVADMVLNLTPDKQHTSVVKAVVPLMKQGACLSYSHGFNIVEEGTQVRDDLTVIMVAPKCPGTEVREEYLRGFGVPTLIAVHRENDPNGNGLELAKAYAAGTGGHRAGVLESSFIAEVKSDLMGEQTILCGMLQSGALLCFDRMVEEGIDPAYAAKLVQYGWETVTEGLKQGGVTNMMDRLSNPAKIRAFDLADEMKTILRPLFEKHQDDIMTGDFSRTMMEDWANDDANLLKWRAETNETPFEKQPLTDQPIDEQTYYDQGILMVAMVKAGVELAFEVMVEAGIIDESAYYESLHETPLIANTIARKKLYEMNIVISDTAEYGCYLFDQAARPMLKDFMQRQGSDVIGKGLDGGNGVDNKRLIEVNDAIRNHPVEVVGRTLRGYMTGMQAITSAD

SEQ ID NO: 528 - protein, 492 aa, Haemophilus influenzae
MANYFNILNLRQKLDQLGRCRFMDREEFADEANFLKGKKIVIVGCGAQGLNQGLNMRDSGLDISYALRPEAIAEKRASFQRATENGFKVGTYEELIPTADLVVNLTPDKQHSKVVADVMPLMKKDSAFGYSHGFNIVEVGEEIRKDITVVMVAPKCPGTEVREEYKRGFGVPTLIAVHPENDPKGEGMAIAKAWAAATGGHKAGVLESSFVAEVKSDLMGEQTILCGMLQAGSIVCYDKLVADGKDPAYAGKLIQYGWETITEALKQGGITLMMDRLSNSAKLRAFELAEQIKESLGFLYYKHMDDIISGHFSATMMADWANGDKDLFAWREATGKTAFENAPKYDGKISEQEYFDNGVLMIAMVKAGVELAFDAMVASGIYEESAYYESLHELPLIANTIARKRLYEMNVVISDTAEYGNYLFSNVATPILAKEIIPNLQKGDLGEPTPAVEVDNITLRDVNDAIRNHPVELIGQELRGYMTDMKRIAVAG

SEQ ID NO: 529 - protein, 492 aa, Providencia rettgeri
MTMANYFNTLNLREQLAQLGKCRFMQREEFADEAGFLKGKKIVIVGCGAQGLNQGLNMRDSGLDIAYALRDEAIAEKRASWRKATENGFKVGTYEELIPTADLVINLTPDKQHSTVVRAVQPMMKQGAALGYSHGFNIVEVGEEIRKDITVVMVAPKCPGTEVREEYKRGFGVPTLIAVHPENDPKGEGMAIAKAWAAATGGHRAGVLESSFVAEVKSDLMGEQTILCGMLQAGALLSYDKMVADGVEPGYAGKLIQFGWETITEALKQGGITLMMDRLSNPAKIRAYALSEQLKTIMAPLFQKHMDDIISGEFSATMMADWANDDKNLLTWREETGKTAFENYPEYEGKIAEQEYFDHGVLLVAMVKAGVELAFDTMLEAGILEESAYYESLHELPLIANTIARKRLYEMNVVISDTAEYGNYLFSFAVVPMLKDFMTKLQAGDLAKPVADNGTDNAQLRDINEAIRNHPIEKIGKTLRGYMTDMKKIAVG

SEQ ID NO: 530 - protein, 492 aa, Edwardsiella tarda
MTNYFNTLNLRQQLAQLGKCRFMAREEFADGVAALRGKKVVIVGCGAQGLNQGLNMRDSGLDVAYALRNEAIAERRDSYRRASEHGFVVGDYQTLIPQADLVINLTPDKQHSAVVRAVQPLMKQGAALGYSHGFNIVEVGEQIRPDITVVMVAPKCPGTEVREEYKRGFGVPTLIAVHPENDPRGEGMAIAKAWAVATGGDRAGVLESSFVAEVKSDLMGEQTILCGMLQTGSLLCYERLVADGADPAWAGKLIQFGWETITEALKQGGITLMMDRLSNPAKLRAHELAEQLKVLLAPLFAKHMDDIISGEFSRGMMADWAEDDRHLLTWRAQTGKSAFENAPPFSGKIDEQSYFDHGVLLVAMVKAGVELAFETMVASGIVAESAYYESLHELPLIANTIARKRLYEMNVVISDTAEYGNYLFANAAVPLLRQHVMTTLQAGDLGQALPVSAVDNTTLRDVNQAIRQHPIEIVGERLRGYMTAMKRIAVAE

SEQ ID NO: 531 - protein, 492 aa, Shewanella baltica
MANYFNSLNLRQQLAQLGQCRFMDRSEFSDGCNYIKDWNIVILGCGAQGLNQGLNMRDSGLNISFALRPEAIEQKRASWQKATDNGFRVGTFEELIPAADLVLNLTPDKQHSNVVNAVMPLMKQGSTLSYSHGFNIVEEGMQVRPDITVVMVAPKCPGTEVREEYKRGFGVPTLIAVHPENDPDGDGLEIAKAYASATGGDRAGVLLSSFIAEVKSDLMGEQTILCGMLQTGAILGYEKMIADGVEPGYAAKLIQQGWETVTEALKHGGITNMMDRLSNPAKIKAFEIAEDLKEILQPLFEKHMDDIISGEFSHTMMEDWANDDANLLRWRAETGETGFENAPVSSEHIDEQTYFDKGIFLVAMIKAGVELAFDTMVSAGIVEESAYYESLHETPLIANTIARKRLYEMNVVISDTAEYGCYLFNHAAVPMLRDYVNAMSSEYLGAGLKDSATGVDNLTLIAVNEAIRETAVEYVGAELRGYMTDMKSIVEA

SEQ ID NO: 532 - protein, 492 aa, Aggregatibacter segnis
MANYFNTLNLRQQLDQLGRCRFMDRSEFATEADFLKGKKIVIVGCGAQGLNQGLNMRDSGLDISYALRPEAIAEKRASFQRASENGFKVGTYEELIPKADLVINLTPDKQHSKVVADVMPLMKKGAALGYSHGLNIVEVGEQIRPDITVVMVAPKCPGTEVREEYKRGFGVPTLIAVHPENDPQGEGLEIAKAWAAATGGHRAGVLESSFVAEVKSDLMGEQTILCGMLQAGSLICYDKLVADGKDPAYAGKLVQYGWETITEALKQGGITLMMDRLSNSAKLRAFELAEQIKEELAFLFAKHMDDIISGEFSRVMMEDWANGDANLLKWREETGKTAFENAPKYEGKISEQEYFDHGVLMIAMVKAGVELAFDTMVASGIYEESAYYESLHELPLIANTIARKRLYEMNVVISDTAEYGNYLFANVAGPIMQKALVPTLRKGDIGEPTPSVEIDNITLRDVNDAIRNHPVELIGQELRGYMKDMKRVSLQG

SEQ ID NO: 533 - protein, 492 aa, Haemophilus haemolyticus
MANYFNTLNLRQKLDQLGRCRFMDREEFADEANFLKGKKIVIVGCGAQGLNQGLNMRDSGLDISYALRPEAIAEKRASFQRATENGFKVGTYEELIPTADLVVNLTPDKQHSKVVADVMPLMKKDSAFGYSHGFNIVEVGEEIRKDITVVMVAPKCPGTEVREEYKRGFGVPTLIAVHPENDPKGEGMAIAKAWAAATGGHKAGVLESSFVAEVKSDLMGEQTILCGMLQAGSIVCYDKLVADGKDPAYAGKLIQYGWETITEALKQGGITLMMDRLSNSAKLRAFELAEKIKESLGFLYYKHMDDIISGHFSATMMADWANGDKDLFAWREATGKTAFENAPKYDGKISEQEYFDNGVLMIAMVKAGVELAFEAMVASGIYEESAYYESLHELPLIANTIARKRLYEMNVVISDTAEYGNYLFSNVATPILAKEIIPNLQKGDLGEPTPAVEIDNITLRDVNDAIRNHPVELIGQELRGYMTDMKRIAVAG

SEQ ID NO: 534 - protein, 491 aa, Escherichia coli
MANYFNTLNLRQQLAQLGKCRFMGRDEFADGASYLQGKKVVIVGCGAQGLNQGLNMRDSGLDISYALRKEAIAEKRASWRKATENGFKVGTYEELIPQADLVINLTPDKQHSDVVRTVQPLMKDGAALGYSHGFNIVEVGEQIRKDITVVMVAPKCPGTEVREEYKRGFGVPTLIAVHPENDPKGEGMAIAKAWAAATGGHRAGVLESSFVAEVKSDLMGEQTILCGMLQAGSLLCFDKLVEEGTDPAYAKKLIQFGWETITEALKQGGITLMMDRLSNPAKLRAYALSEQLKEIMAPLFQKHMDDIISGEFSSGMMADWANDDKKLLTWREETGKTAFETAPQYEGKIGEQEYFDKGVLMIAMVKAGVELAFETMVDSGIIEESAYYESLHELPLIANTIARKRLYEMNVVISDTAEYGNYLFSYACVPLLKPFMAELQPGDLGKAIPEGAVDNGQLRDVNEAIRSHAIEQVGKKLRGYMTDMKRIAVAG

SEQ ID NO: 535 - protein, 491 aa, Buchnera aphidicola
MNYFNKLCFRKRINEIKKCRFMKENEFKNENKILKIKKIVIVGCGSQGLNQALNMRDSGLNISFALKKNSILRKNSSWLNATKNNFEVNDYESLIPNADLVINLTPDKQHENVVKELQKLMKKNSCLGYSHGFNIVECGEIIRKDITVVMVAPKCPGTEVREEFKRGFGVPTLIAVHTENDPKKIGLEIAKAWAFSTGGHRAGVLESSFIAEVKSDLMGEQTILCGLLQTASLICYEKLIKDKHNPSYAAKLIQYGWETITESLKHGGITLMMDRLSNPSKIKAFKISKKIKKILSPLFKKHMDDIISGSFSKEMMIDWHNNDKKLLNWREDTKKTPFEKNILSYSEKISEQEYYDHGTLMVSILKSGIELAFETMINTGIINESAYYESLHELPLIANTIARKKLYEMNIVISDTAEYGSYLFSEAAYPILKDFIMSLEKNVLGLSLPNTKIDNIELYKINEEIRNHPIEIVGKKLRKHMKEMKSICVAK

SEQ ID NO: 536 - protein, 491 aa, Unknown
  uncultured gamma proteobacterium
MGQNYFNTLPLRVQLQELGKCRFMERSEFANGCDILKGKKIVIVGCGSQGLNQGLNLRDSGLDVSYALRAEAIAEKRKSWQNASENGFTVGTYEELIPTADVVMNLTPDKQHTAVVTAVMPLMKEGACLDYAHGFNLVEEGMQIRKDITVVMMCPKCPGTEVREEYKRGFGVPTLIAVHRENDPNGNGLEIAKALASGTGGDRAGVLESSPIAEVKSDLMGEQTILCGMLQTGSILCFDKMVEEGIDPGYASKLIQYGWETVTEGLKHGGITHMMDRLSNPAKVKAFELAEELKDIMRALYEKHQDDIMSGHFSRTMMEDWANDDKNLLGWRAATAETAFEKAETGAMEISEQEYYDNGILMVAMVKAGVELAYETMVAAGIKDESAYYESLHETPLIANTIARKKLYEMNVVISDTAEYGCYLFDHACKPLLKDFMSKVKTDVIGKGLDVSDNGVDNQQLITINSALRDHPVEVIGRKLRGYMTAMKKIV

SEQ ID NO: 537 - protein, 491 aa, Escherichia coli
MANYFNTLNLRQQLAQLGKCRFMGRDEFADGASYLQGKKVVIVGCGAQGLNQGLNMRDSGLDISYALRKEAIAEKRASWRKATENGFKVGTYEELIPQADLVVNLTPDKQHSDVVRTVQPLMKDGAALGYSHGFNIVEVGEQIRKDITVVMVAPKCPGTEVREEYKRGFGVPTLIAVHPENDPKGEGMAIAKAWAAATGGHRAGVLESSFVAEVKSDLMGEQTILCGMLQAGSLLCFDKLVEEGTDPAYAEKLIQFGWETITEALKQGGITLMMDRLSNPAKLRAYALSEQLKEIMAPLFQKHMDDIISGEFSSGMMADWANDDKKLLTWREETGKTAFETTPQYEGKIGEQEYFDKGVLMIAMVKAGVELAFETMVDSGIIEESAYYESLHELPLIANTIARKRLYEMNVVISDTAEYGNYLFSYACVPLLKPFMAELQPGDLGKAIPEGAVDNAQLRDVNEAIRSHAIEQVGKKLRGYMTDMKRIAVAG

SEQ ID NO: 538 - protein, 491 aa, Klebsiella pneumoniae
MANYFNTLNLRQQLAQLGKCRFMARDEFADGASYLQGKKVVIVGCGAQGLNQGLNMRDSGLDISYALRKEAIAEKRASWRKATENGFKVGTYEELIPQADLVVNLTPDKQHSDVVRSVQPLMKDGAALGYSHGFNIVEVGEQIRKDITVVMVAPKCPGTEVREEYKRGFGVPTLIAVHPENDPKGEGMAIAKAWAAATGGHRAGVLESSFVAEVKSDLMGEQTILCGMLQAGSLLCFDKLVAEGTDPAYAEKLIQFGWETITEALKQGGITLMMDRLSNPAKLRAYALSEQLKEIMAPLFQKHMDDIISGEFSSGMMADWANDDKKLLTWREETGKTAFETAPQYEGKIGEQEYFDKGVLMIAMVKAGVELAFETMVASGIIEESAYYESLHELPLIANTIARKRLYEMNVVISDTAEYGNYLFSYACVPLLKEFMTTLQAGDLGTAIAEGAVDNAQLRDVNEAIRSHAIEQVGKKLRGYMTDMKRIAVAG

SEQ ID NO: 539 - protein, 491 aa, Candidatus Ishikawaella
MDNYFNKLNLRNQLIQLSKCRFMSRNEFTDSINYLKRKKIVIVGCGSQGLNQGLNMRDSGLDISYVLRQESIEKKNKTWSNANLNGFKIGTYNTLIPDADLIINLTPDKQHSEIIQQIQPLMKTGAALGYSHGFNIVEVGQLIRKDITVVMVAPKCPGTEVREEYKRGFGVPTLIAVHCENDPKQEGLAIAKAWATSIGADRAGVLESSFIAEVKSDLMGEQTILCGLLQTGSLLCFNKLVSNGVDVVYATNLVQFGWEVITESLKFGGITLMMDRLSNPAKLRAYYLSEKLKTLLTPLFRKHMDDILSGKFSCDMMKDWTNGDKNLLFWREKTRQTNFENQPFYSNNIPESDYYEHGIIMVAMVKAGVELAFETMREAGILAESAYYESLHELPLIANTIARKRLYEMNIVISDTAEYGNYLFSFEAIPLLKQFMEKLLDEDLGKSISCKKVDNKELRDVNEAICNHPIEIIGRKLRSYMINMKPITISK

SEQ ID NO: 540 - protein, 491 aa, Arsenophonus nasoniae
MANYFNALNLRQQLLQLSQCRFMARDEFIAGASYLKDKKIVIVGCGAQGLNQGLNMRDSGLDVAYALRKEAIEEKRPSWCQAIENGFTVGTYATLIPQADLVINLTPDKQHSAVVQTIQPLMKQGAALGYSHGFNIVEVGEPIRQDITVIMVAPKCPGTEVREEYLRGFGVPTLIAVHPENDPQGEGINIAKAWAAATGGHRAGVLESSFVAEVKSDLMGEQTILCGMLQAGSLLCYDKMVAEGVEPGYAGKLIQYGWETITEALKQGGITLMMDRLANPAKLRAFALSEQLKTIMAPLFQQHMDDIMSGKFSATMMADWQNNDNNLLTWRAETRQTAFENYPTYKGKILEQEYFDHGLLLVAMTKAGVELAYETMLQAGIVAESAYYESLHELPLIANTIARKRLYEMNVVISDTAEYGNYLFSSAAIPLLKDFIATLQPGDLAKNIPVSQIDNRQLRDTNEAIRNHPIEIIGKKLRNYMTDMKRIDAAS

SEQ ID NO: 541 - protein, 491 aa, Shigella dysenteriae
MANYFNTLNLRQQLAQLGKCRFMGRDEFADGASYLQGKKVIIVGCGAQGLNQGLNMRDSGLDISYALRKEAIAEKRASWRKATENGFKVGTYEELIPQADLVVNLTPDKQHSDVVRTVQPLMKDGAALGYSHGFNIVEVGEQIRKDITVVMVAPKCPGTEVREEYKRGFGVPTLIAVHPENDPKGEGMAIAKAWAAATGGHRAGVLESSFVAEVKSDLMGEQTILCGMLQAGSLLCFDKLVEEGTDPAYAEKLIQFGWETITEALKQGGITLMMDRLSNPAKLRAYALSEQLKEIMAPLFQKHMDDIISGEFSSGMMADWANDDKKLLTWREETGKTAFETAPQYEGKIGEQEYFDKGVLMIAMVKAGVELAFETMVDSGIIEESAYYESLHELPLIANTIARKRLYEMNVVISDTAEYGNYLFSYACVPLLKPFMAELQPGDLGKAIPEGAVDNAQLRDVNEAIRCHAIEQVGKKLRGYMTDMKRIAVAG

SEQ ID NO: 542 - protein, 491 aa, Shigella boydii
MANYFNTLNLRQQLAQLGKCRFMGRDEFADGASYLQGKKVVIVGCGAQGLNQGLNMRDSGLDISYALRKEAIAEKRASWRKATENGFKVGTYEELIPQADLVVNLTPDKQHSDVVRTVQPLMKDGAALGYSHGFNIVEVGEQIRKDITVVMVAPKCPGTEVREEYKRGFGVPTLIAVHPENDPKGEGMAIAKAWAAATGGHRAGVLESSFVAEVKSDLMGEQTILCGMLQAGSLLCFDKLVEEGTDPAYAEKLIQFGWETITEALKQGGITLMMDRLSNPAKLRAYALSEQLKEIMAPLFQKHMDDIISGEFSSGMMADWANDDKKLLTWREETGKTAFETALQYEGKIGEQEYFDKGVLMIAMVKAGVELAFETMVDSGIIEESAYYESLHELPLIANTIARKRLYEMNVVISDTAEYGNYLFSYACVPLLKPFMAELQPGDLGKAIPEGAVDNAQLRDVNEAIRSHAIEQVGKKLRGYMTDMKRIAVAG

SEQ ID NO: 543 - protein, 491 aa, Escherichia coli
MANYFNTLNLRQQLAQLGKCRFMGRDEFADGASYLQGKKVVIVGCGAQGLNQGLNMRDSGLDISYALRKEAIAEKRASWRKATENGFKVGTYEELIPQADLVVNLTPDKQHSDVVRTVQPLMKDGAALGYSHGFNIVEVGEQIRKDITVVMVAPKCPGTEVREEYKRGFGVPTLIAVHPENDPKGEGMAIAKAWAAATGGHRAGVLESSFVAEVKSDLMGEQTILCGMLQAGSLLCFDKLVEEGTDPAYAEKLIQFGWETITEALKQGGITLMMDRLSNPAKLRAYALSEQLKEIMAPLFQKHMDDIISGEFSSGMMADWANDDKKLLTWREETGKTAFETALQYEGKIGEQEYFDKGVLMIAMVKAGVELAFETMVDSGIIEESAYYESLHELPLIANTIARKRLYEMNVVISDTAEYGNYLFSYACVPLLKPFMAELQPGDLGKAIPEGAVDNAQLRDVNEAIRCHAIEQVGKKLRGYMTDMKRIAVAG

SEQ ID NO: 544 - protein, 491 aa, Escherichia coli
MANYFNTLNLRQQLAQLGKCRFMGRDEFADGASYLQGKKVVIVGCGAQGLNQGLNMRDSGLDISYALRKEAIAEKRASWRKATENGFKVGTYEELIPQADLVVNLTPDKQHSDVVRTVQPLMKDGAALGYSHGFNIVEVGEQIRKDITVVMVAPKCPGTEVREEYKRGFGVPTLIAVHPENDPKGEGMAIAKAWAAATGGHRAGVLESSFVAEVKSDLMGEQTILCGMLQAGSLLCFDKLVEEGTDPAYAEKLIQFGWETITEALKQGGITLMMDRLSNPAKLRAYALSEQLKEIMAPLFQKHMDDIISGEFSSGMMADWANDDKKLLTWREETGKTAFETAPQFEGKIGEQEYFDKGVLMIAMVKAGVELAFETMVDSGIIEESAYYESLHELPLIANTIARKRLYEMNVVISDTAEYGNYLFSYACVPLLKPFMAELQPGDLGKAIPEGAVDNAQLRDVNEAIRSHAIEQVGKKLRGYMTDMKRIAVAG

SEQ ID NO: 545 - protein, 491 aa, Pasteurella multocida
MANYFNTLNLRQQLDQLGRCRFMDRNEFANEADYLKGKKIVIVGCGAQGLNQGLNMRDSGLDISYALRAEAIAEKRASFQRATENGFKVGTYDELIPSADLVVNLTPDKQHSKVVADVMPLMKQGAALGYSHGLNIVEVGEQIRQDITVVMVAPKCPGTEVREEYKRGFGVPTLIAVHPENDPNGDGLEIAKAWAAATGGHRAGVLESSFVAEVKSDLMGEQTILCGMLQAGSIVCYDKLVADGKDPAYAGKLIQYGWETITEALKQGGITLMMDRLSNSAKLRAFELSEQIKAKLTFLFEKHMDDIISGEFSATMMADWANGDANLLKWREETGKTAFENAPKYEGKISEQEYFDHGVLMVAMVKAGVESAFDTMVASGIYEESAYYESLHELPLIANTIARKRLYEMNVVISDTAEYGNYLFANVATPILAKEIMPTLQKGDLGEPTPTVEIDNITLRDVNDAIRNHPIELIGQELRGYMTDMKRISSH

SEQ ID NO: 546 - protein, 491 aa, Escherichia coli
MANYFNTLNLRQQLAQLGKCRFMGRDEFADGASYLQGKKVVIVGCGAQGLNQGLNMRDSGLDISYALRKEAIAEKRASWRKATENGFKVGTYEELIPQADLVVNLTPDKQHSDVVRTVQPLMKDGAALGYSHGFNIVEVGEQIRKDITVVMVAPKCPGTEVREEYKRGFGVPTLIAVHPENDPKGEGMAIAKAWAAATGGHRAGVLESSFVAEVKSDLMGEQTILCGMLQAGSLLCFDKLVEEGTDSAYAEKLIQFGWETITEALKQGGITLMMDRLSNPAKLRAYALSEQLKEIMAPLFQKHMDDIISGEFSSGMMADWANDDKKLLTWREETGKTAFETAPQYEGKIGEQEYFDKGVLMIAMVKAGVELAFETMVDSGIIEESAYYESLHELPLIANTIARKRLYEMNVVISDTAEYGNYLFSYACVPLLKPFMAELQPGDLGKAIPEGAVDNAQLRDVNEAIRSHAIEQVGKKLRGYMTDMKRIAVAG

SEQ ID NO: 547 - protein, 491 aa, Escherichia coli
MANYFNTLNLRQQLAQLGKCRFMGRDEFADGASYLQGKKVVIVGCGAQGLNQGLNMRDSGLDISYALRKEAIAEKRASWRKATENGFKVGTYEELIPQADLVVNLTPDKQHSDVVHTVQPLMKDGAALGYSHGFNIVEVGEQIRKDITVVMVAPKCPGTEVREEYKRGFGVPTLIAVHPENDPKGEGMAIAKAWAAATGGHRAGVLESSFVAEVKSDLMGEQTILCGMLQAGSLLCFDKLVEEGTDPAYAEKLIQFGWETITEALKQGGITLMMDRLSNPAKLRAYALSEQLKEIMAPLFQKHMDDIISGEFSSGMMADWANDDKKLLTWREETGKTAFETAPQYEGKIGEQEYFDKGVLMIAMVKAGVELAFETMVDSGIIEESAYYESLHELPLIANTIARKRLYEMNVVISDTAEYGNYLFSYACVPLLKPFMAELQPGDLGKAIPEGAVDNAQLRDVNEAIRSHAIEQVGKKLRGYMTDMKRIAVAG

SEQ ID NO: 548 - protein, 491 aa, Pasteurella multocida
MANYFNTLNLRQQLDQLGRCRFMDRNEFANEADYLKGKKIVIVGCGAQGLNQGLNMRDSGLDISYALRAEAIAEKRASFQRATENGFKVGTYDELIPSADLVVNLTPDKQHSKVVADVMPLMKQGAALGYSHGLNIVEVGEQIRKDITVVMVAPKCPGTEVREEYKRGFGVPTLIAVHPENDPNGDGLEIAKAWAAATGGHRAGVLESSFVAEVKSDLMGEQTILCGMLQAGSIVCYDKLVADGKDPAYAGKLIQYGWETITEALKQGGITLMMDRLSNSAKLRAFELSEQIKAKLTFLFEKHMDDIISGEFSATMMADWANGDANLLKWREETGKTAFENAPKYEGKISEQEYFDHGVLMVAMVKAGVELAFDTMVASGIYEESAYYESLHELPLIANTIARKRLYEMNVVISDTAEYGNYLFANVATPILAKEIMPTLQKGDLGEPTPTVEIDNITLRDVNDAIRNHPIELIGQELRGYMTDMKRISSH

SEQ ID NO: 549 - protein, 491 aa, Escherichia coli
MANYFNTLNLRQQLAQLGKCRFMGRDEFADGASYLQGKKVVIVGCGAQGLNQGLNMRDSGLDISYALRKEAIAEKRASWRKATENGFKVGTYEELIPQADLVVNLTPDKQHSDVVHTVQPLMKDGAALGYSHGFNIVEVGEQIRKDITVVMVAPKCPGTEVREEYKRGFGVPTLIAVHPENDPKGEGMAIAKAWAAATGGHRAGVLESSFVAEVKSDLMGEQTILCGMLQAGSLLCFDKLVEEGTDPAYAEKLIQFGWETITEALKQGGITLMMDRLSNPAKLRAYALSEQLKEIMAPLFQKHMDDIISGEFSSGMMADWANDDKKLLTWREETGKTAFETAPQYEGKIGEQEYFDKGVLMIAMVKAGVELAFETMVDSGIIEESAYYESLHELPLIANTIARKRLYEMNVVISDTAEYGNYLFSYACVPLLKPFMAELQPGDLGKAIPEGAVDNAQLRDLNEAIRSHAIEQVGKKLRGYMTDMKRIAVAG

SEQ ID NO: 550 - protein, 491 aa, Salmonella enterica
MANYFNTLNLRQQLAQLGKCRFMGRDEFADGASYLQGKKVVIVGCGAQGLNQGLNMRDSGLDISYALRKEAIAEKRASWRKATENGFKVGTYEELIPQADLVVNLTPDKQHSDVVRSVQPLMKDGAALGYSHGFNIVEVGEQIRKDITVVMVAPKCPGTEVREEYKRGFGVPTLIAVHPENDPKGEGMAIAKAWAAATGGHRAGVLESSFVAEVKSDLMGEQTILCGMLQAGSLLCFDKLVAEGTDPAYAEKLIQFGWETITEALKQGGITLMMDRLSNPAKLRAYALSEQLKEIMAPLFQKHMDDIISGEFSSGMMADWANDDKKLLTWREETGKTAFETAPQFEGKIGEQEYFDKGVLMIAMVKAGVELAFETMVDSGIIEESAYYESLHELPLIANTIARKRLYEMNVVISDTAEYGNYLFSYACVPLLKPFMAELQPGDLGSAIPEGAVDNAQLRDVNDAIRSHAIEQVGKKLRGYMTDMKRIAVAG

SEQ ID NO: 551 - protein, 491 aa, Salmonella enterica
MANYFNTLNLRQQLAQLGKCRFMGRDEFADGASYLQGKKVVIVGCGAQGLNQGLNMRDSGLDISYALRKEAIAEKRASWRKATENGFKVGTYEELIPQADLVVNLTPDKQHSDVVRSVQPLMKDGAALGYSHGFNIVEVGEQIRKDITVVMVAPKCPGTEVREEYKRGFGVPTLIAVHPENDPQGEGMAIAKAWAAATGGHRAGVLESSFVAEVKSDLMGEQTILCGMLQAGSLLCFDKLVAEGTDPAYAEKLIQFGWETITEALKQGGITLMMDRLSNPAKLRAYALSEQLKEIMAPLFQKHMDDIISGEFSSGMMADWANDDKKLLTWREETGKTAFETAPQYEGKIGEQEYFDKGVLMIAMVKAGVELAFETMVDSGIIEESAYYESLHELPLIANTIARKRLYEMNVVISDTAEYGNYLFSYACVPLLKPFMAELQPGDLGSAIPEGAVDNAQLRDVNDAIRSHAIEQVGKKLRGYMTDMKRIAVAG

SEQ ID NO: 552 - protein, 491 aa, Buchnera aphidicola
MNYFNKLCFRKRINEIKKCRFMKENEFKNENKILKNKKIVIVGCGSQGLNQALNMRDSGLNISFALKKNSILRKNSSWLNATKNNFEVNDYESLIPNADLVINLTPDKQHENVVKELQKLMKKNSCLGYSHGFNIVECGEIIRKDITVVMVAPKCPGTEVREEFKRGFGVPTLIAVHTENDPKKIGLEIAKAWAFSTGGHRAGVLESSFIAEVKSDLMGEQTILCGLLQTASLICYEKLIKDKHNPSYAAKLIQYGWETITESLKHGGITLMMDRLSNPSKIKAFKISKKIKKILSPLFKKHMDDIISGSFSKEMMIDWHNNDKKLLNWREDTKKTPFEKNILSYSEKISEQEYYDHGTLMVSILKSGIELAFETMINTGIINESAYYESLHELPLIANTIARKKLYEMNIVISDTAEYGSYLFSEAAYPILKDFIMSLEKNVLGLSLPNTKIDNIELYKINEEIRNHPIEIVGKKLRKHMKEMKSICVAK

SEQ ID NO: 553 - protein, 491 aa, Buchnera aphidicola
MGSNYFNSLNFRQKLIQLRQCTLIRKEEFSETFKILKGKNIVIVGCGSQGLNQGLNMRDSGLNVKYALRKNSIISQRSSWKRAIDNKFLVGTCEELIPTADLVINLTPDKQHEHVVDVLQNLMKKNSILGFSHGFNIIEFGQKIRQDITVIMVAPKCPGTEVREEYKRNFGVPTLISVHLDNDCHNIGLEVAKEWATAIGGHRAGVLHSSFSAEVKSDLMGEQTILCGLLQTGSVLCYDKLISQGHDCHYAVKLVQSGWEVITESLKHGGITLMFDRLSNTAKIRAYKLSNDLKKILSPIFKKHMDDILSGYYSKNMMLDWKNDDKQLKIWRRSIQNTSFEQCSISHITLLEHEYFENGLLMVAIIRAGVELAFEIMIEAGIKEESAYYESLHELPLIANTIARKRLYEMNLIISDTAEYGSHLFFQSAFPLLQDFMNTLEHGDLGNKMLDQAINNVDLNYINTTIRNHPVEHIGQKLRRYMTNIKQINCY

SEQ ID NO: 554 - protein, 491 aa, Shigella flexneri
MANYFNTLNLRQQLAQLGKCRFMGRDEFADGASYLQGKKVVIVGCGAQGLNQGLNMRDSGLDISYALRKEAIAEKRASWRKATENGFKVGTYEELIPQADLVVNLTPDKQHSDVVRTVQPLMKDGAALGYSHGFNIVEVGEQIRKDITVVMVAPKCPGTEVREEYKRGFGVPTLIAVHPENDPKGEGMAIAKAWAAATGGHRAGVLESSFVAEVKSDLMGEQTILCGMLQAGSLLCFDKLVEEGTDPAYAEKLIQFGWETITEALKQGGITLMMDRLSNPAKLRAYALSEQLKEIMAPLFQKHMDDIISGEFSSGMMADWANDDKKLLTWREETGKTAFETAPQYEGKIGEQEYFDKGVLMIAMVKAGVELAFETMVDSGIIEESAYYESLHELPLIANTIVRKRLYEMNVVISDTAEYGNYLFSYACVPLLKPFMAELQPGDLGKAIPEGAVDNAQLRDVNEAIRSHAIEQVGKKLRGYMTDMKRIAVAG

SEQ ID NO: 555 - protein, 491 aa, Enterobacter sp.
MANYFNTLNLRQQLAQLGKCRFMARDEFADGASYLQGKKVVIVGCGAQGLNQGLNMRDSGLDISYALRKEAIAEKRASWRKATENGFKVGTYEELVPQADLVVNLTPDKQHSDVVRSVQPLMKDGAALGYSHGFNIVEVGEQIRKDITVVMVAPKCPGTEVREEYKRGFGVPTLIAVHPENDPKGEGMAIAKAWAAATGGHRAGVLESSFVAEVKSDLMGEQTILCGMLQAGSLLCFDKLVEEGTDPAYAEKLIQFGWETITEALKQGGITLMMDRLSNPAKLRAYALSEQLKEIMAPLFQKHMDDIISGEFSSGMMSDWANDDKNLLTWREETGKTAFETASQFDGKISEQEYFDKGVLMIAMVKAGVELAFETMVDSGIIEESAYYESLHELPLIANTIARKRLYEMNVVISDTAEYGNYLFSYACVPLLKEFMTTLQTGDLGKAVAEGAVDNAQLRDVNEAIRSHAIESVGHTLRGYMKDMKRIAVAG

SEQ ID NO: 556 - protein, 491 aa, Klebsiella pneumoniae
MANYFNTLNLRQQLAQLGKCRFMARDEFADGASYLQGKKVVIVGCGAQGLNQGLNMRDSGLDISYALRKEAIAEKRASWRKATENGFKVGTYEELIPQADLVVNLTPDKQHSDVVRSVQPLMKDGAALGYSHGFNIVEVGEQIRKDITVVMVAPKCPGTEVREEYKRGFGVPTLIAVHPENDPKGEGMAIAKAWAAATGGHRAGVLESSFVAEVKSDLMGEQTILCGMLQAGSLLCFDKLVAEGTDPAYAEKLIQFGWETITEALKQGGITLMMDRLSNPAKLRAYALSEQLKEIMAPLFQKHMDDIISGEFSSGMMADWANDDKKLLTWREETGKTAFETAPQYEGKIGEQEYFDKGVLMIAMVKAGVELAFETMVASGIIEESAYYESLHELPLIANTIARKRLYEMNVVISDTAEYGNYLFSYACVPLLKEFMTTLQTGDLGTAIAEGAVDNAQLRDVNEAIRSHAIEQVGKKLRGYMTDMKRIAVAG

SEQ ID NO: 557 - protein, 491 aa, Cronobacter sakazakii
MANYFNTLNLRQQLAQLGKCRFMARDEFADGAGYLKGKKVVIVGCGAQGLNQGLNMRDSGLDVSYALRKEAIAEKRASWRKATENGFQVGTYEELIPQADLVVNLTPDKQHSDVVRAVQPLMKDGAALGYSHGFNIVEVGEQIRKDITVVMVAPKCPGTEVREEYKRGFGVPTLIAVHPENDPKGEGMAIAKAWAAATGGHRAGVLESSFVAEVKSDLMGEQTILCGMLQAGSLLCFDKLVEEGTDPAYAEKLIQFGWETITEALKQGGITLMMDRLSNPAKLRAYALSEQLKTIMAPLFQKHMDDIISGEFSSGMMADWANDDKKLLTWREETGKTAFENAPQYEGKISEQEYFDKGVLMIAMVKAGVELAFETMVAAGIIEESAYYESLHELPLIANTIARKRLYEMNVVISDTAEYGNYLFANAAVPLLKEFMTKLQPGDLGKAVEGTAVDNAQLRDVNDAIRSHEIEKVGQKLRGYMTDMKRIAVAG

SEQ ID NO: 558 - protein, 491 aa, Citrobacter koseri
MANYFNTLNLRQQLAQLGKCRFMGRDEFADGASYLQGKKVVIVGCGAQGLNQGLNMRDSGLDIAYALRKEAIAEKRASWRKATENGFKVGTYEELIPQADLVVNLTPDKQHSDVVRSVQPLMKDGAALGYSHGFNIVEVGEQIRKDITVVMVAPKCPGTEVREEYKRGFGVPTLIAVHPENDPKGEGMAIAKAWAAATGGHRAGVLESSFVAEVKSDLMGEQTILCGMLQAGSLLCFDKLVEEGTDPAYAEKLIQYGWETITEALKQGGITLMMDRLSNPAKLRAYALSEQLKTIMAPLFQKHMDDIISGEFSSGMMADWANDDKKLLTWREETGKTAFETAPQYEGKIGEQEYFDKGVLMIAMVKAGVELAFETMVDSGIIEESAYYESLHELPLIANTIARKRLYEMNVVISDTAEYGNYLFSYACVPLLKAFMTEIQPGDLGKAIAEGAVDNAQLRDVNEAIRGHAIEKVGQKLRGYMTDMKRIAVAG

SEQ ID NO: 559 - protein, 491 aa, Serratia proteamaculans
MANYFNTLNLRQQLAQLGKCRFMAREEFADEAGYLKGKKVVIVGCGAQGLNQGLNMRDSGLDVAYALRKEAIDEKRPSWRKATENGFKVGTYEDLIPQADLVVNLTPDKQHTSVVRAVQPLMKDGAALGYSHGFNIVEVGEQVRKDITVVMVAPKCPGTEVREEYKRGFGVPTLIAVHPENDPKGEGMAIAKAWAAATGGHRAGVLESSFVAEVKSDLMGEQTILCGMLQAGSLLCFDKLVAEGTDPAYAEKLIQFGWETITEALKQGGITLMMDRLSNPAKLRAYALSEQLKGIMAPLFQKHMDDIISGAFSGGMMADWAEDDVKLLNWREETGKSAFENAPQFEGKISEQEYFDHGVLMVAMVKAGVELAFETMVDAGIIEESAYYESLHELPLIANTIARKRLYEMNVVISDTAEYGNYLFANAAVPLLKEFMTTLQAGDLGKSVAGTSVDNAQLRDVNEAVRNHPIESVGRKLRGYMTDMKRIAVAG

SEQ ID NO: 560 - protein, 491 aa, Salmonella enterica
MANYFNTLNLRQQLAQLGKCRFMGRDEFADGASYLQGKKVVIVGCGAQGLNQGLNMRDSGLDISYALRKEAIAEKRASWRKATENGFKVGTYEELIPQADLVINLTPDKQHSDVVRSVQPLMKDGAALGYSHGFNIVEVGEQIRKDITVVMVAPKCPGTEVREEYKRGFGVPTLIAVHPENDPKGEGMAIAKAWAAATGGHRAGVLESSFVAEVKSDLMGEQTILCGMLQAGSLLCFDKLVEEGTDPAYAEKLIQFGWETITEALKQGGITLMMDRLSNPAKLRAYALSEQLKAIMAPLFQKHMDDIISGEFSSGMMADWANDDKKLLTWREETGKTAFETAPQYEGKIGEQEYFDKGVLMIAMVKAGVELAFETMVDSGIIEESAYYESLHELPLIANTIARKRLYEMNVVISDTAEYGNYLFSYACVPLLKPFMAELQPGDLGKAIAEGSVDNAQLRDVNDAIRSHAIEKVGQKLRGYMTDMKRIAVAG

SEQ ID NO: 561 - protein, 491 aa, Salmonella enterica
MANYFNTLNLRQQLAQLGKCRFMGRDEFADGASYLQGKKVVIVGCGAQGLNQGLNMRDSGLDISYALRKEAIAEKRASWRKATENGFKVGTYEELIPQADLVVNLTPDKQHSDVVRSVQPLMKDGAALGYSHGFNIVEVGEQIRKDITVVMVAPKCPGTEVREEYKRGFGVPTLIAVHPENDPKGEGMAIAKAWAAATGGHRAGVLESSFVAEVKSDLMGEQTILCGMLQAGSLLCFDKLVAEGTDPAYAEKLIQFGWETITEALKQGGITLMMDRLSNPAKLRAYALSEQLKEIMAPLFQKHMDDIISGEFSSGMMADWANDDKKLLTWREETGKTAFETAPQFEGKIGEQEYFDKGVLMIAMVKAGVELAFETMVDSGIIEESAYYESLHELPLIANTIARKRLYEMNVVISDTAEYGNYLFSYACVPLLKPFMAELQPGDLGSAIPEGAVDNAQLRDVNDAIRSHAIEQVGKKLRGYMKDMKRIAVAG

SEQ ID NO: 562 - protein, 491 aa, Salmonella enterica
MANYFNTLNLRQQLAQLGKCRFMGRDEFADGASYLQGKKVVIVGCGAQGLNQGLNMRDSGLDISYALRKEAIAEKRASWRKATENGFKVGTYEELIPQADLVVNLTPDKQHSDVVRSVQPLMKDGAALGYSHGFNIVEVGEQIRKDITVVMVAPKCPGTEVREEYKRGFGVPTLIAVHPENDPKGEGMAIAKAWAAATGGHRAGVLESSFVAEVKSDLMGEQTILCGMLQAGSLLCFDKLVAEGTDPAYAEKLIQFGWETITEALKQGGITLMMDRLSNPAKLRAYALSEQLKEIMAPLFQKHMDDIISGEFSSGMMADWANDDKKLLTWREETGKTAFETAPQFEGKIGEQEYFDKGVLMIAMVKAGVELAFETMVDSGIIEESAYYESLHELPLIANTIARKRLYEMNVVISDTAEYGNYLFSYACVPLLKPFIAELQPGDLGSAIPEGAVDNAQLRDVNDAIRSHAIEQVGKKLRGYMTDMKRIAVAG

SEQ ID NO: 563 - protein, 491 aa, Proteus mirabilis
MANYFNTLNLRQQLSQLGKCRFMSRDEFADEANYLKGKKVVIVGCGAQGLNQGLNMRDSGLDIAYALRQEAIDEKRASWRRATENGFEVGTYEALIPQADLVVNLTPDKQHSAVVQAVQPLMKSGAALGYSHGFNIVEVGEKIRDDITVVMVAPKCPGTEVREEYKRGFGVPTLIAVHPENDAKGEGMAIAKAWAAATGGHRAGVLESSFVAEVKSDLMGEQTILCGMLQAGSLLCYDKMVAEGVEPGYAGKLIQFGWETITEALKQGGITLMMDRLSNPAKMRAYALSEQLKEIMAPLFAKHMDDIISGKFSETMMADWANDDKNLLTWREETGASAFENYPEYEGKISEQEYFDHGVLMVAMVKAGVELAFDTMIEAGIIAESAYYESLHELPLIANTIARKRLYEMNVVISDTAEYGNYLFSFAAVPMLKEFMTTLQSGDLAKHVPDSGTDNAQLRDINEAIRQHPIEIVGKKLRGYMTDMKKIAVAN

SEQ ID NO: 564 - protein, 491 aa, Salmonella enterica
MANYFNTLNLRQQLAQLGKCRFMGRDEFADGASYLQGKKVVIVGCGAQGLNQGLNMRDSGLDISYALRKEAIAEKRASWRKATENGFKVGTYEELIPQADLVVNLTPDKQHSDVVRSVQPLMKDGAALGYSHGFNIVEVGEQIRKDITVVMVAPKCPGTEVREEYKRGFGVPTLIAVHPENDPKGEGMAIAKAWAAATGGHRAGVLESSFVAEVKSDLMGEQTILCGMLQAGSLLCFDKLVAEGTDPAYAEKLIQFGWENITEALKQGGITLMMDRLSNPAKLRAYALSEQLKEIMAPLFQKHMDDIISGEFSSGMMADWANDDKKLLTWREETGKTAFETAPQFEGKIGEQEYFDKGVLMIAMVKAGVELAFETMVDSGIIEESAYYESLHELPLIANTIARKRLYEMNVVISDTAEYGNYLFSYACVPLLKPFMAELQPGDLGSAIPEGAVDNAQLRDVNDAIRSHAIEQVGKKLRGYMTDMKRIAVAG

SEQ ID NO: 565 - protein, 491 aa, Klebsiella pneumoniae
MANYFNTLNLRQQLAQLGKCRFMGRDEFADGASYLQGKKVVIVGCGAQGLNQGLNMRDSGLDISYALRKEAIAEKRASWRKATENGFKVGTYEELIPQADLVVNLTPDKQHSDVVRSVQPLMKDGAALGYSHGFNIVEVGEQIRKDITVVMVAPKCPGTEVREEYKRGFGVPTLIAVHPENDPKGEGMAIAKAWAAATGGHRAGVLESSFVAEVKSDLMGEQTILCGMLQAGSLLCFDKLVAEGTDPAYAEKLIQFGWETITEALKQGGITLMMDRLSNPAKLRAYALSEQLKEIMAPLFQKHMDDIISGEFSSGMMADWANDDKKLLTWREETGKTAFETAPQYEGKIGEQEYFDKGVLMIAMVKAGVELAFETMVDSGIIEESAYYESLHELPLIANTIARKRLYEMNVVISDTAEYGNYLFSYACVPLLKEFMTTLQTGDLGKAIAEGAVDNAQLRDVNEAIRSHAIEQVGKKLRGYMTDMKRIAVAG

SEQ ID NO: 566 - protein, 491 aa, Escherichia fergusonii
MANYFNTLNLRQQLAQLGKCRFMGRDEFADGASYLQGKKVVIVGCGAQGLNQGLNMRDSGLDISYALRKEAITEKRASWRKATENGFKVGTYEELIPQADLVVNLTPDKQHSDVVRTVQPLMKDGAALGYSHGFNIVEVGEQIRKDITVVMVAPKCPGTEVREEYKRGFGVPTLIAVHPENDPKGEGMAIAKAWAAATGGHRAGVLESSFVAEVKSDLMGEQTILCGMLQAGSLLCFDKLVEEGTDPAYAEKLIQFGWETITEALKQGGITLMMDRLSNPAKLRAYALSEQLKEIMAPLFQKHMDDIISGEFSSGMMADWANDDKKLLTWREETGKTAFETAPQYEGKIGEQEYFDKGVLMIAMVKAGVELAFETMVDSGIIEESAYYESLHELPLIANTIARKRLYEMNVVISDTAEYGNYLFSYACVPLLKPFMAELQPGDLGKAIPEGAVDNAQLRDVNEAIRSHAIEQVGKKLRGYMTDMKRIAVAG

SEQ ID NO: 567 - protein, 491 aa, Escherichia coli
MANYFNTLNLRQQLAQLGKCRFMGRDEFADGASYLQGKKVVIVGCGAQGLNQGLNMRDSGLDISYALRKEAIAEKRASWRKATENGFKVGTYEELIPQADLVVNLTPDKQHSDVVRTVQPLMKDGAALGYSHGFNIVEVGEQIRKDITVVMVAPKCPGTEVREEYKRGFGVPTLIAVHPENDPKGEGMAIAKAWAAATGGHRAGVLESSFVAEVKSDLMGEQTILCGMLQAGSLLCFDKLVEEGTDPAYAEKLIQFGWETITEALKQGGITLMMDRLSNPAKLRAYALSEQLKEIMAPLFQKHMDDIISGEFSSGMMADWTNDDKKLLTWREETGKTAFETAPQYEGKIGEQEYFDKGVLMIAMVKAGVELAFETMVDSGIIEESAYYESLHELPLIANTIARKRLYEMNVVISDTAEYGNYLFSYACVPLLKPFMAELQPGDLGKAIPEGAVDNAQLRDVNEAIRSHAIEQVGKKLRGYMTDMKRIAVAG

SEQ ID NO: 568 - protein, 491 aa, Escherichia coli
MANYFNTLNLRQQLAQLGKCRFMGRDEFADGASYLQGKKVVIVGCGAQGLNQGLNMRDSGLDISYALRKEAIAEKRASWRKATENGFKVGTYEELIPQADLVVNLTPDKQHSDVVHTVQPLMKDGAALGYSHGFNIVEVGEQIRKDITVVMVAPKCPGTEVREEYKRGFGVPTLIAVHPENDPKGEGMAIAKAWAAATGGHRAGVLESSFVAEVKSDLMGEQTILCGMLQAGSLLCFDRLVEEGTDPAYAEKLIQFGWETITEALKQGGITLMMDRLSNPAKLRAYALSEQLKEIMAPLFQKHMDDIISGEFSSGMMADWANDDKKLLTWREETGKTAFETAPQYEGKIGEQEYFDKGVLMIAMVKAGVELAFETMVDSGIIEESAYYESLHELPLIANTIARKRLYEMNVVISDTAEYGNYLFSYACVPLLKPFMAELQPGDLGKAIPEGAVDNAQLRDVNEAIRSHAIEQVGKKLRGYMTDMKRIAVAG

SEQ ID NO: 569 - protein, 491 aa, Robiginitalea biformata
MTNYFNTLSLREQLQQLGKCRFMDPSEFSEGVAALKGAKIVIVGCGAQGLNQGLNMRDSGLDISYALREAAIQEKRTSFQNATENGFPVGTYEELIPTADLVINLTPDKQHTNVINSVMPHMKKGATLSYSHGFNIVEEGMQIREDLTVIMVAPKSPGSEVREEYKRGFGVPTLIAVHPENDPEGKGLAQAKAYAAATGGHKAGVLESSFVAEVKSDLMGEQTILCGLLQTGSILCFDKMVEGGVDPGYASKLIQYGWETITEGLKYGGITNMMDRLSNPAKIRAFELSEELKEIMRPLFRKHMDDIMSGHFSKTMMEDWANDDKNLLTWRAATGETNFEKTPAGSDKISEQEYYDKGVLMVAMVRAGVELAYESMTESGIIGESAYYESLHETPLIANTIARKKLFEMNRVISDTAEYGCYLFDHACKPLLKDFMAKIDTDVIGNSFGEGQDNGVDNAKLIAVNKALRTHPVEIVGARLRASMTAMKPIV

SEQ ID NO: 570 - protein, 491 aa, Cronobacter turicensis
MANYFNTLNLRQQLAQLGKCRFMARDEFADGAGYLKGKKVVIVGCGAQGLNQGLNMRDSGLDVSYALRKEAIAEKRASWRKATENGFQVGTYEELIPQADLVVNLTPDKQHSDVVRAVQPLMKDGAALGYSHGFNIVEVGEQIRKDITVVMVAPKCPGTEVREEYKRGFGVPTLIAVHPENDPKGEGMAIAKAWAAATGGHRAGVLESSFVAEVKSDLMGEQTILCGMLQAGSLLCFDKLVEEGTDPAYAEKLIQFGWETITEALKQGGITLMMDRLSNPAKLRAYALSEQLKTIMAPLFQKHMDDIISGEFSSGMMADWANDDKKLLTWREETGKTAFENAPQFEGKISEQEYFDKGVLMIAMVKAGVELAFETMVAAGIIEESAYYESLHELPLIANTIARKRLYEMNVVISDTAEYGNYLFANAAVPLLKDFMTKLQPGDLGKAVEGTAVDNAQLRDVNDAIRSHEIEKVGHKLRGYMTDMKRIAVAD

SEQ ID NO: 571 - protein, 491 aa, Citrobacter rodentium
MANYFNTLNLRQQLAQLGKCRFMGRDEFADGASYLQGKKVVIVGCGAQGLNQGLNMRDSGLDIAYALRKEAIAEKRASWRKATENGFKVGTYEELIPQADLVVNLTPDKQHSDVVRAVQPLMKDGAALGYSHGFNIVEVGEQIRKDITVVMVAPKCPGTEVREEYKRGFGVPTLIAVHPENDPKGEGMAIAKAWAAATGGHRAGVLESSFVAEVKSDLMGEQTILCGMLQAGSLLCFDKLVEEGADPAYAEKLIQYGWETITEALKQGGITLMMDRLSNPAKLRAYALSEQLKTIMAPLFQKHMDDIISGEFSSGMMADWANDDKKLLTWREETGKTAFETAPQYEGKIGEQEYFDKGVLMIAMVKAGVELAFETMVDSGIIEESAYYESLHELPLIANTIARKRLYEMNVVISDTAEYGNYLFSYACVPLLKEFMTTLQPGDLGKAIAEGAVDNAQLRDVNEAIRGHAIEQVGKKLRGYMTDMKRIAVAS

SEQ ID NO: 572 - protein, 491 aa, Pantoea ananatis
MANYFNTLNLRNQLAQLGKCRFMGRDEFADGASFLKGKKIVIVGCGAQGLNQGLNMRDSGLDVSYTLRAEAIAEKRASFRKATENGFKVGTYEELIPQADLVVNLTPDKQHSAVVQAVQPLMKDGAALGYSHGFNIVEVGETIRKDITVVMVAPKCPGTEVREEYKRGFGVPTLIAVHPENDPKGEGMAIAKAWASATGGDRAGVLESSFVAEVKSDLMGEQTILCGMLQAGSLLCFDKLVAEGHDAAYTEKLIQFGWETITESLKFGGITLMMDRLSNPAKLRAYALSEQLKGIMAPLFQKHMDDIISGDFSAGMMADWANDDKKLLTWREETGKTAFETAPQFDGKIEEQEYYDKGVVMVAMVKAGVELAFETMVDAGIIEESAYYESLHELPLIANTIARKRLYEMNVVISDTAEYGNYLFSFAAVPLLKEFMTTLQPGDLGKAIEGTQVDNAQLRDVNEAVRQHPIEQVGRKLRGYMTDMKRIAVAG

SEQ ID NO: 573 - protein, 491 aa, Enterobacter cloacae
MANYFNTLNLRQQLAQLGKCRFMARDEFADGASYLQGKKVVIVGCGAQGLNQGLNMRDSGLDISYALRKEAIAEKRASWRKATENGFKVGTYEELIPQADLVVNLTPDKQHSDVVRSVQPLMKDGAALGYSHGFNIVEVGEQIRKDITVVMVAPKCPGTEVREEYKRGFGVPTLIAVHPENDPKGEGMAIAKAWAAATGGHRAGVLESSFVAEVKSDLMGEQTILCGMLQAGSLLCFDKLVEEGTDPAYAEKLIQFGWETITEALKQGGITLMMDRLSNPAKLRAFALSEQLKTIMAPLFQKHMDDIISGEFSSGMMADWANDDKKLLTWREETGKTAFETAPQYEGKIGEQEYFDKGVLMIAMVKAGVELAFETMVDSGIIEESAYYESLHELPLIANTIARKRLYEMNVVISDTAEYGNYLFSYACVPLLKEFMTTLQPGDLGKAIAEGAVDNAQLRDVNEAIRSHQIEKVGHKLRGYMTDMKRIAVAG

SEQ ID NO: 574 - protein, 491 aa, Maribacter sp.
MTNYFNTLSLRDRLTQLGKCRFMDSSEFSDGVTALKGKKIVIVGCGAQGLNQGLNMRDSGLDIAYTLREAAIKEKRQSYKNATENGFTVGTYEELVPSADLVINLTPDKQHTNVVSAVMPLMKDGATLSYSHGFNIVEEGMQVRKDLTVIMVAPKSPGSEVREEYKRGFGVPTLIAVHPDNDPQGKGLEQAKAYAAGTGGHKAGVLESSFVAEVKSDLMGEQTILCGLLQTGSILCFDKMIEKGIDAGYASKLIQYGWETVTEGLKYGGITNMMDRLSNPAKIKAFELSEELKDIMRPLFHKHMDDIMSGHFSKTMMEDWANDDKNLLSWRAATGETAFEKTPAGDMNISEQEFYDNGVLMVAMVRAGVELAYESMTESGIIGESAYYESLHETPLIANTIARKKLFEMNRVISDTAEYGCYLFDHACKPLLGDFMKGIDTDVIGTHFGEGKDNGVDNAKLITVNKALRDHDVEIVGARLRASMTAMKPIV

SEQ ID NO: 575 - protein, 491 aa, Pantoea vagans
MANYFNTLNLRNQLAQLGKCRFMARDEFADGASFLKGKKVVIVGCGAQGLNQGLNMRDSGLDVAYALRAEAIAEKRPSWRKATDNGFKVGTYEDLIPQADLVVNLTPDKQHSAVVQAVQPLMKDGAALGYSHGFNIVEVGESIRKDITVVMVAPKCPGTEVREEYKRGFGVPTLIAVHPENDPKGEGMAIAKAWAAATGGDRAGVLESSFVAEVKSDLMGEQTILCGMLQAGSLLCFDKLVAEGTDPAYAEKLIQFGWETITESLKFGGITLMMDRLSNPAKLRAYALSEQLKTIMAPLFQKHMDDIISGEFSSGMMADWANDDKNLLIWREETGQTAFETASQYEGKIEEQEYYDKGVVMVAMVKAGVELAFETMVDAGIIEESAYYESLHELPLIANTIARKRLYEMNVVISDTAEYGNYLFSFAAVPLLKEFMTTLQPGDLGKAVEGTQVDNAQLRDVNEAVRQHPIETVGRKLRGYMTDMKRIAVAG

SEQ ID NO: 576 - protein, 491 aa, Enterobacter cloacae
MANYFNTLNLRQQLAQLGKCRFMGREEFADGASYLQGKKVVIVGCGAQGLNQGLNMRDSGLDISYALRKEAIAEKRASWRKATENGFKVGTYEELIPQADLVVNLTPDKQHSDVVRSVQPLMKDGAALGYSHGFNIVEVGEQIRKDITVVMVAPKCPGTEVREEYKRGFGVPTLIAVHPENDPKGEGMAIAKAWAAATGGHRAGVLESSFVAEVKSDLMGEQTILCGMLQAGSLLCFDKLVQEGADPAYAEKLIQFGWETITEALKQGGITLMMDRLSNPAKLRAYALSEQLKEIMAPLFQKHMDDIISGEFSSGMMADWANDDKKLLTWREETGKTAFETAPQFEGKIGEQEYFDKGVLMIAMVKAGVELAFETMVASGIIEESAYYESLHELPLIANTIARKRLYEMNVVISDTAEYGNYLFSYACVPLLKSFMTEIQPGDLGKAIAEGAVDNAQLRDVNEAIRGHAIEQVGKKLRGYMTDMKRIAVAG

SEQ ID NO: 577 - protein, 491 aa, Pantoea sp.
MANYFNTLNLRNQLAQLGKCRFMARDEFADGASFLKGKKVVIVGCGAQGLNQGLNMRDSGLDIAYALRAEAIAEKRASFRKATDNGFKVGTYEELIPQADLVVNLTPDKQHSAVVQAVQPLMKDGAALGYSHGFNIVEVGETIRKDITVVMVAPKCPGTEVREEYKRGFGVPTLIAVHPENDPKGEGLAIAKAWASATGGDRAGVLESSFVAEVKSDLMGEQTILCGMLQAGSLLCFDKLVAEGNDAAYVEKLIQFGWETITESLKFGGITLMMDRLSNPAKLRAYALSEQLKGIMAPLFQKHMDDIISGEFSSGMMADWANDDKNLLTWREETGKTAFETAPQFAGKIEEQEYYDKGVLMVAMVKAGVELAFETMIDAGIIEESAYYESLHELPLIANTIARKRLYEMNVVISDTAEYGNYLFSFAAVPLLKEFMTTLQPGDLGKAVEGTQVDNAQLRDVNEAIRQHPIEAVGRKLRGYMTDMKRIAVAG

SEQ ID NO: 578 - protein, 491 aa, Cellulophaga algicola
MANYFNTLSLREQLTQLGKCRFMDTSEFSDGVDALKGKKIVIIGCGAQGLNQGLNMRDSGLDISYTLRDAAIKEQRQSYKNAKENGFTVGTYQELIPIADLVINLTPDKQHTNVVETVMPLMKKGATLSYSHGFNIVEEGMQVRKDLTVIMVAPKSPGSEVREEYKRGFGVPTLIAVHPENDPEGKGLAEAKAYAVATGGDKAGVLESSFVAEVKSDLMGEQTILCGLLQTGSILCFDKMIAKGLDAGYASRLIQYGWETVTEGLKYGGITHMMDRLSNPAKIKAFELSEELKEIMRPLFQKHMDDIIEGEFSKTMMEDWANDDKNLLTWRAETGETAFEKTPAGSDKISEQEFYDHGVLMVAMVRAGVELAFEAMTDSGIIAESAYYESLHETPLIANTIARKKLFEMNRVISDTAEYGCYLFDHACKPLLKDFMSKIDTDVIGKKFGEGKGNGVDNAKLIEVNKALREHPVEIVGARLRASMTAMKPIV

SEQ ID NO: 579 - protein, 491 aa, Desulfobulbus propionicus
MGQNYFNTLPLRLQLEELGKCRFMDASEFADGVDKLKGKKIVIVGCGAQGLHQGLNLRDSGLDVSYALRDSAISEKRQSWKNATSNGFTVGNYQQLIPTADLVINLTPDKQHSKVVAAVMPLMKEGACLSYSHGFNIVEEGMQIRKDLTVIMVAPKSPGTEVREEYKRGFGVPTLIAVHRENDPKGEGWDIAKAYACGTGAHRAGVLQSSFVAEVKSDLMGEQTILCGMLQAGSLLCFDKMVAGGIDAGYASKLIQYGWETVTEALKHGGITNMMDRLSNPAKIRAYYLSEEIKEILTPLFEKHMDDIMSGEFSRTMMEDWANDDKKLLTWRAQTAETAFEKAVSTDAEISEQEYFDHGILMIAMVKAGVELAFDTMVSAGIKEESAYYESLHEVPLIANTIARKKLYEMNVVISDTAEYGCYLFAHQAVPLLADFMKNVDTDVIGKGLAVKDNSVDNIELIGINAAIRYTVVEQVGEELRSHMSAMKPII

SEQ ID NO: 580 - protein, 491 aa, Rahnella sp.
MANYFNTLNLRQQLAQLGKCRFMGRDEFADEASYLKGKKVVIVGCGAQGLNQGLNMRDSGLDVSYTLRAEAIAEKRASWRKATENGFKVGTYEELIPQADLVINLTPDKQHSAVVKAVQPLMKDGATLGYSHGFNIVEVGEQIRKDITVVMVAPKCPGTEVREEYKRGFGVPTLIAVHPENDPKGEGMAIAKAWAAATGGHRAGVLQSSFVAEVKSDLMGEQTILCGMLQAGSLLCFDKLVADGVDEAYAEKLLQFGWETITEALKQGGITLMMDRLSNPAKLRAYALSEQLKEIMAPLFQKHMDDIISGEFSSGMMADWANDDKKLLTWREETGATAFENAPQFEGKISEQEYFDHGVVMIAMVKAGVELAFETMVASGIIEESAYYESLHELPLIANTVARKRLYEMNVVISDTAEYGNYLFANAAVPLLKEFMTTLQAGDLGKSVAETQVDNAQLRDVNEAIRNHPIESIGRTLRGYMTDMKRIAVAS

SEQ ID NO: 581 - protein, 491 aa, Cellulophaga lytica
MSNYFNTLSLRDKLTQLGKCRFMDTAEFSDGVTALKGKKIVIIGCGAQGLNQGLNMRDSGLDISYALRDAAIKEKRASYNNATENGFTVGNYEELIPTADLVINLTPDKQHTNVVNTVMPLMKNGATLSYSHGFNIVEEGTQVRKDLTVIMVAPKSPGSEVREEYKRGFGVPTLIAVHPENDPEGKGLAQAKAYAAATGGHKAGVLESSFVAEVKSDLMGEQTILCGLLQTGSILCFDKMVEEGIDAGYASKLIQYGWETVTEGLKYGGITNMMDRLSNPAKIKAFELAEELKDIMRPLFQKHMDDIMEGEFSKTMMEDWANGDKNLLDWRAATGETNFEKTPASDVEISEQEFYDNGVLMIAMVRAGVELAFEAMTDSGIIEESAYYESLHETPLIANTIARKKLFEMNRVISDTAEYGCYLFDHACKPLLKDFMAKVNTSVIGKPYAADAGNGVDNAKLIAVNKALREHPVEIVGARLRASMTAMKPIV

SEQ ID NO: 582 - protein, 491 aa, Gallibacterium anatis
MANYFNTLNLRQKLDQLGRCRFMDRSEFADEANFLKGKKIVIVGCGAQGLNQGLNMRDSGLDISYALRKEAIAEKRASFQRASENGFVVGSYEELIPQADLVINLTPDKQHSNVVQAVMPLMKQGSALGYSHGLNIVEVGEQIRPDITVVMVAPKCPGTEVREEYKRGFGVPTLIAVHPENDPKGEGMAIAKAWAAATGGHRAGVLESSFVAEVKSDLMGEQTILCGMLQAGSLICYDKLVADGKDPAYAAQLVQFGWETITEALKLGGITLMMDRLSNSAKLRAFELSEQIKAMLTPLFQKHMDDIISGEFSRVMMEDWANGDKKLLTWREETGKSAFENAPKYEGKIKEQEYFDNGVLMIAMAKAGVELAFDTMVSSGIIEESAYYESLHELPLIANTIARKRLYEMNVVISDTAEYGNYLFANVATPIMREKLVPQLQKGDLGEPTPTVEIDNITLRDVNEAIRNHPIEKVGQKLRGYMKDMKRIIVA

SEQ ID NO: 583 - protein, 491 aa, Enterobacter aerogenes
MANYFNTLNLRQQLAQLGKCRFMGRDEFADGASYLQGKKVVIVGCGAQGLNQGLNMRDSGLDISYALRKEAIAEKRASWRKATENGFKVGTYEELIPQADLVVNLTPDKQHSDVVRSVQPLMKDGAALGYSHGFNIVEVGEQIRKDITVVMVAPKCPGTEVREEYKRGFGVPTLIAVHPENDPKGEGMAIAKAWAAATGGHRAGVLESSFVAEVKSDLMGEQTILCGMLQAGSLLCFDKLVAEGTDPAYAEKLIQFGWETITEALKQGGITLMMDRLSNPAKLRAYALSEQLKEIMAPLFQKHMDDIISGEFSSGMMADWANDDKKLLTWREETGKTAFETAPQYEGKIGEQEYFDKGVLMIAMVKAGVELAFETMVDSGIIEESAYYESLHELPLIANTIARKRLYEMNVVISDTAEYGNYLFSYACVPLLKEFMTTLQTGDLGKAIAEGAVDNAQLRDVNEAIRSHAIEAVGKKLRGYMTDMKRIAVAG

SEQ ID NO: 584 - protein, 491 aa, Salmonella bongori
MANYFNTLNLRQQLAQLGKCRFMGRDEFADGASYLQGKKVVIVGCGAQGLNQGLNMRDSGLDISYALRKEAIAEKRASWRKATENGFKVGAYEELIPQADLVVNLTPDKQHSDVVRAVQPLMKDGAALGYSHGFNIVEVGEQIRKDITVVMVAPKCPGTEVREEYKRGFGVPTLIAVHPENDPKGEGMAIAKAWAAATGGHRAGVLESSFVAEVKSDLMGEQTILCGMLQAGSLLCFDKLVEEGTDPAYAEKLIQFGWETITEALKQGGITLMMDRLSNPAKLRAYALSEQLKAIMAPLFQKHMDDIISGEFSSGMMADWANDDKKLLTWREETGKTAFETAPQYEGKIGEQEYFDKGVLMIAMVKAGVELAFETMVDSGIIEESAYYESLHELPLIANTIARKRLYEMNVVISDTAEYGNYLFSYACVPLLKPFMAELQPGDLGKAIPEGAVDNAQLRDVNDAIRGHAIEQVGKKLRGYMTDMKRIAVAG

SEQ ID NO: 585 - protein, 491 aa, Zobellia galactanivorans
MANYFNTLSLRDQLAQLGKCRFMEASEFSEGVSALKGKKIVIVGCGAQGLNQGLNMRDSGLDISYALRDAAIKEKRQSFLNATENGFTVGTYAELIPSADMVINLTPDKQHTAVVGAVMPLMKKGATLSYSHGFNIVEEGTQVREDLTVIMVAPKSPGSEVREEYKRGFGVPTLIAVHPENDPEGKGLEQAKAYAAATGGHRAGVLESSFVAEVKSDLMGEQTILCGLLQTGSILCFDKMIEKGIDAGYASKLIQYGWETITEGMKYGGITNMMDRLSNPAKIKAFELSEELKEIMRPLFQKHMDDIMTGHFSKTMMEDWANDDKNLLTWRAETGETAFEKTPAGDDKISEQEFYDNGVLMIAMVRAGVELAYESMTESGIIGESAYYESLHETPLIANTIARKKLFEMNRVISDTAEYGCYLFDHACKPLLADFMKKIDTDVIGKAYGEGKDNGVDNAKLIAVNKVLREHPVEIVGARLRASMTAMKPIV

SEQ ID NO: 586 - protein, 491 aa, Muricauda ruestringensis
MANYFNTLSLREQLTQLGKCRFMDSSEFADGVTALKGKKIVIVGCGAQGLNQGLNMRDSGLDISYALRPAAIKEERQSFKNAKENNFVVGTYEELIPTADLVINLTPDKQHTNVVSTVMPLMKKGATLSYSHGFNIVEEGMQVREDLTVIMVAPKSPGSEVREEYKRGFGVPTLIAVHPENDPEGKGLEQAKAYAAGTGGDKAGVLESSFVAEVKSDLMGEQTILCGLLQTGSILSFNKMIEKGVDAAYASKLIQYGWETITEGLKQGGITNMMDRLSNPAKIKAFDLAEELKVIMRPLFQKHMDDIMSGHFSKTMMEDWDNGDKNLLDWRAATGETAFEKTPAGDMEISEQEYYDNGVLMVAFVKSGVELAYETMTESGIIGDSAYYESLHETPLIANTIARKKLFEMNRVISDTAEYGCYLFDHACKPLLTDFMKKVDTDIIGKHFGKGKDTGVDNVRLIAVNKAIREHDVEVVGARLRASMTAMKPIG

SEQ ID NO: 587 - protein, 491 aa, Enterobacter asburiae
MANYFNTLNLRQQLAQLGKCRFMARDEFADGASYLQGKKVVIVGCGAQGLNQGLNMRDSGLDISYALRKEAIAEKRASWRKATENGFKVGTYEELIPQADLVVNLTPDKQHSDVVRSVQPLMKDGAALGYSHGFNIVEVGEQIRKDITVVMVAPKCPGTEVREEYKRGFGVPTLIAVHPENDPKGEGMAIAKAWAAATGGHRAGVLESSFVAEVKSDLMGEQTILCGMLQAGSLLCFDKLVEEGTDPSYAEKLIQFGWETITEALKQGGITLMMDRLSNPAKLRAFALSEQLKTIMAPLFQKHMDDIISGEFSSGMMADWANDDKNLLTWREETGKTAFETAAQFDGKISEQEYFDKGVLMIAMVKAGVELAFETMVDSGIIEESAYYESLHELPLIANTIARKRLYEMNVVISDTAEYGNYLFSYACVPLLKEFMTTLQAGDLGKAIAEGAVDNAQLRDVNDAIRSHEIEKIGQKLRGYMTDMKRIAVAG

SEQ ID NO: 588 - protein, 491 aa, Candidatus Blochmannia pennsylvanicus
MANYFNTLTFIEKLKHLGKCRFMSNNEFSNGIQALLSKKVAIIGCGSQGLNQGLNMRDSGVNITYALRRESILNKQESWARATRNGFPVGTYDEIIPKSDVVINLTPDKCHTSVIRQIEPLMKHGSTLGYSHGFHIVEVGEKIRQDITVIMVAPKCPGTEVRQEYQRGFGVPALIAVHEENDTYDMGMTLAKSWAFALGSHRAGVLESSFVAEVKSDLMGEQTILCGMLQAGSILCFDYMISNGVNAAYAGKFIQCGWEVITEALKQGGITLMMDRLSNASKIRAFILSEKLKNILKPVFEKHMENILNGVFSKEMMLDWENNDSKLLKWREKTSQLPLEQAPNYQQEILEQTYFDYGILMVAIIKSGIELSFDTMIKSGIAPESAYYESLHELPLIANTIARKKLYEMNMVISDTAEYGNYLFCDKVVPLLKKTIIPNLRTGDLGMSPKNVNVDNIVLRNTNDMIRNHTIEKVGIQLRSYMQNMKSLSFN

SEQ ID NO: 589 - protein, 491 aa, Shigella sonnei
MANYFNTLNLRQQLAQLGKCRFMGRDEFADGASYLQGKKVVIVGCGAQGLNQGLNMRDSGLDISYALRKEAIAEKRASWRKATENGFKVGTYEELIPQADLVVNLTPDKQHSDVVRTVQPLMKDGAALGYSHGFNIVEVGEQIRKDITVVMVAPKCPGTEVREEYKRGFGVPTLIAVHPENDPKGEGMAIAKAWAAATGGHRAGVLESSFVAEVKSDLMGEQTILCGMLQAGSLLCFDKLVEEGTDPAYAEKLIQFGWETITEALKQGGITLMMDRLSNPAKLRAYALSEQLKEIMAPLFQKHMDDIISGEFSSGMMADWANDDKKLLTWREETGKTAFETAPQYEGKIGEQEYFDKGVLMIAMVKAGVELAFETMVDSGIIEESAYYESLHELPLIANTIARKRLYEMNVVISDTAEYGNYLFSYACVPLLKPFMAELQPGDLGKAIPEGAVDNAQLRDVNEAIRCHAIEQVGKKLRGYMTDMKRIAVAG

SEQ ID NO: 590 - protein, 491 aa, Shigella dysenteriae
MANYFNTLNLRQQLAQLGKCRFMGRDEFADGASYLQGKKVVIVGCGAQGLNQGLNMRDSGLDISYALRKEAIAEKRASWRKATENGFKVGTYEELIPQADLVVNLTPDKQHSDVVRTVQPLMKDGAALGYSHGFNIVEVGEQIRKDITVVMVAPKCPGTEVREEYKRGFGVPTLIAVHPENDPKGEGMAIAKAWAAATGGHRAGVLESSFVAEVKSDLMGEQTILCGMLQAGSLLCFDKLVEEGTDPAYAEKLIQFGWETITEALKQGGITLMMDRLSNPAKLRAYALSEQLKEIMAPLFQKHMDDIISGEFSSGMMADWANDDKKLLTWREETGKTAFETAPQYEGKIGEQEYFDKGVLMIAMVKAGVELAFETMVDSGIIEESAYYESLHELPLIANTIARKRLYEMNVVISDTAEYGNYLFSYACVPLLKPFMAELQPGDLGKAIPEGAVDNAQLHDVNEAIRSHAIEQVGKKLRGYMTDMKRIAVAG

SEQ ID NO: 591 - protein, 491 aa, Escherichia coli
MANYFNTLNLRQQLAQLGKCRFMGRDEFADGASYLQGKKVVIVGCGAQGLNQGLNMRDSGLDISYALRKEAIAEKRASWRKATENGFKVGTYEELIPQADLVVNLTPDKQHSDVVRTVQPLMKDGAALGYSHGFNIVEVGEQIRKDITVVMVAPKCPGTEVREEYKRGFGVPTLIAVHPENDPKGEGMAIAKAWAAATGGHRAGVLESSFVAEVKSDLMGEQTILCGMLQAGSLLCFDKLVEEGTDPAYAEKLIQFGWETITEALKQGGITLMMDRLSNPAKLRAYALSEQLKEIMAPLFQKHMDDIISGEFSSGMMADWANDDKKLLTWREETGKTAFETAPQYEGKIGEQEYFDKGVLMIAMVKAGVELAFETMVDSGIIEESAYYESLHELPLIANTIARKRLYEMNVVISDTAEYGNYLFSYACVPLLKPFMAELQPGDLGKAIPEGAVDNAQLRDVNEAIRSHAIEQVGKKLRGYMTDMKRIAVAG

SEQ ID NO: 592 - protein, 491 aa, Escherichia coli
MANYFNTLNLRQQLAQLGKCRFMGRDEFADGASYLQGKKVVIVGCGAQGLNQGLNMRDSGLDISYALRKEAIAEKRASWRKATENGFKVGTYEELIPQADLVVNLTPDKQHSDVVRSVQPLMKDGAALGYSHGFNIVEVGEQIRKDITVVMVAPKCPGTEVREEYKRGFGVPTLIAVHPENDPKGEGMAIAKAWAAATGGHRAGVLESSFVAEVKSDLMGEQTILCGMLQAGSLLCFDKLVEEGTDPAYAEKLIQFGWETITEALKQGGITLMMDRLSNPAKLRAYALSEQLKEIMAPLFQKHMDDIISGEFSSGMMADWANDDKKLLTWREETGKTAFETAPQYEGKIGEQEYFDKGVLMIAMVKAGVELAFETMVDSGIIEESAYYESLHELPLIANTIARKRLYEMNVVISDTAEYGNYLFSYACVPLLKPFMAELQPGDLGKAIPEGAVDNAQLRDVNEAIRSHAIEQVGKKLRGYMTDMKRIAVAG

SEQ ID NO: 593 - protein, 491 aa, Gramella forsetii; identical to SEQ ID NO: 89

SEQ ID NO: 594 - protein, 491 aa, Marinomonas sp.
MSNNYFNTLPLREQLEQLAKCRFMSMDEFSDGVEALKGKKMVVIGCGAQGLAQGLNLRDSGCDVAYALRPAAIAEKRQSWKNATENGFVVGTYEDLIPTADVVLNLTPDKQHTPVVNAVMPLMKEGACLSYSHGFNIVEEGMQIRDDLTVIMVAPKCPGSEVRNEYVRGFGVPTLIAVHEDNDPKGEGLALAKAYAVGTGGHKAGVLMSSFIAEVKSDLMGEQTILCGMLQTGSILCFDKMVEEGVDAGYASKLVQYGWEVVTEALKYGGVTNMLDRLSNPAKIKAFDLSEELKVIMRPLYNKHQDDIINGTFSRVMMEDWANDDVNLLGWRAETAETNFEKTPAGDVEITEQEFFDNGILMVAMVKAGVELAFETMTAAGIVADSAYYESLHETPLIANTIARKKLYEMNATISDTAEYGCYLYNHACLPLLADFMKDIKTDVIGRGLESSETGVDNARLIEVNKALRSHPVEAIGDTLRGHMADMKKIV

SEQ ID NO: 595 - protein, 491 aa, Polaribacter irgensii
MSNYFNTLTLREKLEQLGKCRFMDASEFEEGVAALKGKKIVIVGCGAQGLNQGLNMRDSGLDISYALRQEAIDQKRASFVNANSNGFTVGTYQELIPTADLVLNLTPDKQHTNVVNTVMPLMKKGATLSYSHGFNIVEEGTQIRKDLTVIMVAPKCPGSEVREEYKRGFGVPTLIAVHPENDPENKGWAQAKAYAVGTGGHRAGVLESSFVAEVKSDLMGEQTILCGLLQTGAILSFDKMVAEGIEPGYAAKLIQYGWETVTEALKHGGITNMMDRLSNPAKVKAFEISEELKEIMRPLFQKHMDDIMTGHFSETMMEDWSNDDKNLLIWRAATGETAFEKQVLTTKEISEQEYFDHGTLLVAFVRAGVELSFEAMTDSGIIEASAYYESLHETPLIANTIARMKLAEMNRVISDTAEYGCYLFDHACKPLLTNFMKTVGTDLIGKKFTDVNDIDNKELIRINGIIRNHPVEIVGAKLRASMTAMKVIKSV

SEQ ID NO: 596 - protein, 491 aa, Pseudoalteromonas tunicata
MTTNYFNTLSLREQLAQLAQCEFMSPSEFTDGVNVLLGKKLVIVGCGAQGLNQGLNLRDSGLDVSYALRESAIAEKRQSFLNASDNGFVVGTYEQLIPTADLVLNLTPDKQHTSVVTAIMPLMKQGSTLAYSHGFNIVEEGMQIRKDITVIMVAPKCPGTEVREEYKRGFGVPTLIAVHPENDPQGKGLAQAKAYAAGTGGHRAGVLLSSFIAEVKSDLMGEQTILCGMLQTGSILCFNKMVEKGIDAAYASKFIQYGWEVITEALKYGGVTNMLDRLTNPAKVKAFELSEELKQIMRPLYNKHMDDIISGEFSSGMMADWAEDDAKLLGWRAETAQTAFEKQTNTDATISEQDFFDKGILMIAMVKAGVELAYETMTAAGIKAESAYYESLHETPLIANTIARKKLFEMNRTISDTAEYGCYLYNHACLPLLANFMQSIETDVIGQGLASTSNAVDNATLIKVNKALREHPVEIIGATLRSYMSDMKPII

SEQ ID NO: 597 - protein, 491 aa, Neptuniibacter caesariensis
MSNNYFNTLPLREQLEQLAKCRFMSMDEFSEGVEALKGKKMVVIGCGAQGLNQGLNLRDSGLDVSYALREAAIAEKRQSWKNATENGFVVGTYEELIPTADVVLNLTPDKQHTSVVNAVMPLMKEGSCLSYSHGFNIVEEGMQIRDDITVIMVAPKCPGSEVRAEYVRGFGVPTLIAVHEDNDPKGEGLALAKAYAVGTGGHKAGVLMSSFIAEVKSDLMGEQTILCGMLQTGSILCFDKMVEKGIDAGYASKLIQYGWETITEALKYGGVTNMLDRLSNPAKIKAFDLSEELKVIMRPLYNKHQDDIINGTFSRVMMEDWANDDKNLLGWRAETAETNFEKTPAGDVEISEQEFFDNGILMVAMVKAGVELAFETMTAAGIIAESAYYESLHETPLIANTIARKKLYEMNATISDTAEYGCYLYNHACLPLLGDFMKNIDTDVIGKGLDLADNGVDNARLIEVNAALRAHPVEAVGAELRAHMADMKKIV

SEQ ID NO: 598 - protein, 491 aa, Psychromonas sp.
MRNYFNSLNLRQQLTQLAQCRFMHSDEFSGTCDLIKDWNIVILGCGSQGLNQGLNMRDSGLNISYALRPEAISEKRASYLSAKSHGFCVDSIENLVPKADMVLNLTPDKQHTHVLNQIMRLMKQGATLSYSHGFNIVEEGMQVRPDITVIMVAPKCPGTEVREEYKRGFGVPTLIAVHPENDPKQQGFDVAKAYACATGGHRAGVLHSSFIAEVKSDLMGEQTILCGMLQTGAILGYEKMIAQGVEPNYASKLIQQGWESISEALKHGGITHMMDRLSNPDKIKAYDMAQELKEILRPLFEKHMDDIISGEFSKNMMLDWKNDDVNLLKWREDTKQSAFEKAPQSDALIDEQEYFDQGVFLVAMLKAGVELAFDTMLLAGIGEASAYYESLHETPLIANTIARKRLYEMNKVISDTAEYGCYLFNHAALPLLSPYVKALPKQVLGGASTTGSNAVDNLRLIEVNRLIRSSKVEKIGAELRFHMRAMKAIVE

SEQ ID NO: 599 - protein, 491 aa, Unknown
  marine gamma proteobacterium
MGQNYFNTLPLRLQLEELAKCRFMAQEEFADGCEYIKGKKIVIVGCGAQGLNQGLNLRDSGLDVSYTLRAAAIEEKRQSYKNASENGFTVGTYEELIPHADIVMNLTPDKQHTDVVTTIMPLMKEGATLDYAHGFNLVEEGMQIRKDITVVMCCPKCPGSEVRAEYVRGFGVPTLIAVHRENDPNGDGLEIAKALASGTGGDRAGVLESSPIAEVKSDLMGEQTILCGMLQTGSILCFDKMVEQGIEPTYASKLIQYGWETITEGLKMGGITNMMDRLSNPAKIKAFDLAEELKDIMRPLYEKHQDDIIAGEFSKTMMVDWANDDANLLGWRAATAETAFEKSANTSQEISEQEYYDHGILMIAMVKAGVELAFETMVAAGIIDESAYYESLHETPLIANTIARKKLYEMNVVISDTAEYGCYLFDHACKPLLQDFMKKISTDVIGKGLNLKDSGVDNQELVAVNAAIRNHPVEVVGTKLRGYMTAMTKIV

SEQ ID NO: 600 - protein, 491 aa, Moritella sp.
MANYFNTLNLRQQLEQLGKCRFMDRSEFADGCNFIKDWSIVIVGCGAQGLNQGLNMRDSGLNISYALRAAAISEKRQSFLNASENGFTVDTYENLIPQADLVLNLTPDKQHSNVVETIMPLMKQGSTLSYSHGFNIVEEGMQVRDDITVVMVAPKCPGSEVREEYKRGFGVPTLIAVHPENDPKGDGLAIAKAYASATGGDRAGVLESSFVAEVKSDLMGEQTILCGMLQTGAILAFDKMVADGKSPAYAGKLIQFGWETITEALKYGGITNMMDRLSNPAKLKAFDMAEEMKTTLRPLFEKHMDDIITGHFSSTMMVDWSNDDVNLLKWRKETGETAFENYPESDIVIDEQEFFDNGTLFVAMIKAGVELAFESMVASGIVDESAYYESLHETPLIANTIARKRLYEMNVVISDTAEYGCYLFSHEAGPQLRDYVNALPAELMGSAFAAESNGVDNARLIEVNDEIRNHPVEVIGKKLRGYMSDMQKIVG

SEQ ID NO: 601 - protein, 491 aa, Salmonella enterica
MANYFNTLNLRQQLAQLGKCRFMGRDEFADGASYLQGKKVVIVGCGAQGLNQGLNMRDSGLDIAYALRKEAITEKRASWRKATENGFKVGTYEELIPQADLVVNLTPDKQHSDVVRSVQPLMKDGAALGYSHGFNIVEVGEQIRKDITVVMVAPKCPGTEVREEYKRGFGVPTLIAVHPENDPKGEGMAIAKAWAAATGGHRAGVLESSFVAEVKSDLMGEQTILCGMLQAGSLLCFDKLVAEGTDPAYAEKLIQFGWETITEALKQGGITLMMDRLSNPAKLRAYALSEQLKEIMAPLFQKHMDDIISGEFSSGMMADWANDDKKLLTWREETGKTAFETAPQFEGKIGEQEYFDKGVLMIAMVKAGVELAFETMVDSGIIEESAYYESLHELPLIANTIARKRLYEMNVVISDTAEYGNYLFSYACVPLLKPFMAELQPGDLGSAIPEGAVDNAQLRDVNDAIRSHAIEQVGKKLRGYMTDMKRIAVAG

SEQ ID NO: 602 - protein, 491 aa, Salmonella enterica
MANYFNTLNLRQQLAQLGKCRFMGRDEFADGASYLQGKKVVIVGCGAQGLNQGLNMRDSGLDISYALRKEAIAEKRASWRKATENGFKVGTYEELIPQADLVVNLTPDKQHSDVVRSVQPLMKDGAALGYSHGFNIVEVGEQIRKDITVVMVAPKCPGTEVREEYKRGFGVPTLIAVHPENDPQGEGMAIAKAWAAATGGHRAGVLESSFVAEVKSDLMGEQTILCGMLQAGSLLCFDKLVAEGTDPAYAEKLIQFGWETITEALKQGGITLMMDRLSNPAKLRAYALSEQLKEIMAPLFQKHMDDIISGEFSSGMMADWANDDKKLLTWREETGKTAFETAPQFEGKIGEQEYFDKGVLMIAMVKAGVELAFETMVDSGIIEESAYYESLHELPLIANTIARKRLYEMNVVISDTAEYGNYLFSYACVPLLKPFMAELQPGDLGSAIPEGAVDNAQLRDVNDAIRSHAIELVGKKLRGYMTDMKRIAVAG

SEQ ID NO: 603 - protein, 491 aa, Salmonella enterica
MANYFNTLNLRQQLAQLGKCRFMGRDEFADGASYLQGKKVVIVGCGAQGLNQGLNMRDSGLDISYALRKEAITEKRASWRKATENGFKVGTYEELIPQADLVVNLTPDKQHSDVVRSVQPLMKDGAALGYSHGFNIVEVGEQIRKDITVVMVAPKCPGTEVREEYKRGFGVPTLIAVHPENDPKGEGMAIAKAWVAATGGHRAGVLESSFVAEVKSDLMGEQTILCGMLQAGSLLCFDKLVAEGTDPAYAEKLIQFGWETITEALKQGGITLMMDRLSNPAKLRAYALSEQLKEIMAPLFQKHMDDIISGEFSSGMMADWANDDKKLLTWREETGKTAFETAPQFEGKIGEQEYFDKGVLMIAMVKAGVELAFETMVDSGIIEESAYYESLHELPLIANTIARKRLYEMNVVISDTAEYGNYLFSYACVPLLKPFMAELQPGDLGSAIPEGAVDNAQLRDVNDAIRSHAIEQVGKKLRGYMTDMKRIAVAG

SEQ ID NO: 604 - protein, 491 aa, Salmonella enterica
MANYFNTLNLRQQLAQLGKCRFMGRDEFADGASYLQGKKVVIVGCGAQGLNQGLNMRDSGLDIAYALRKEAIAEKRASWRKATENGFKVGTYEELIPQADLVVNLTPDKQHSDVVRSVQPLMKDGAALGYSHGFNIVEVGEQIRKDITVVMVAPKCPGTEVREEYKRGFGVPTLIAVHPENDPKGEGMAIAKAWAAATGGHRAGVLESSFVAEVKSDLMGEQTILCGMLQAGSLLCFDKLVAEGTDPAYAEKLIQFGWETITEALKQGGITLMMDRLSNPAKLRAYALSEQLKEIMTPLFQKHMDDIISGEFSSGMMADWANDDKKLLTWREETGKTAFETAPQFEGKIGEQEYFDKGVLMIAMVKAGVELAFETMVDSGIIEESAYYESLHELPLIANTIARKRLYEMNVVISDTAEYGNYLFSYACVPLLKPFMAELQPGDLGSAIPEGAVDNAQLRDVNDAIRSHAIEQVGKKLRGYMTDMKRIAVAG

SEQ ID NO: 605 - protein, 491 aa, Salmonella enterica
MANYFNTLNLRQQLAQLGKCRFMGRDEFADGASYLQGKKVVIVGCGAQGLNQGLNMRDSGLDISYALRKEAIAEKRASWRKATENGFKVGTYEELIPQADLVVNLTPDKQHSDVVRSVQPLMKDGAALGYSHGFNIVEVGEQIRKDITVVMVAPKCPGTEVREEYKRGFGVPTLIAVHPENDPQGEGMAIAKAWAAATGGHRAGVLESSFVAEVKSDLMGEQTILCGMLQAGSLLCFDKLVAEGTDPAYAEKLIQFGWETITEALKQGGITLMMDRLSNPAKLRAYALSEQLKEIMAPLFQKHMDDIISGEFSSGMMADWANDDKKLLTWREETGKTAFETAPQFEGKIGEQEYFDKGVLMIAMVKAGVELAFETMVDSGIIEESAYYESLHELPLIANTIARKRLYEMNVVISDTAEYGNYLFSYACVPLLKPFMAELQPGDLGSAIPEGAVDNAQLRDVNDAIRSHAIEQVGKKLRGYMTDMKRIAVAG

SEQ ID NO: 606 - protein, 491 aa, Escherichia albertii
MANYFNTLNLRQQLAQLGKCRFMGRDEFADGASYLQGKKVVIVGCGAQGLNQGLNMRDSGLDISYALRKEAIAEKRASWRKATENGFKVGTYEELIPQADLVVNLTPDKQHSDVVRAVQPLMKDGAALGYSHGFNIVEVGEQIRKDITVVMVAPKCPGTEVREEYKRGFGVPTLIAVHPENDPKGEGMAIAKAWAAATGGHRAGVLESSFVAEVKSDLMGEQTILCGMLQAGSLLCFDKLVEEGTDPAYAEKLIQFGWETITEALKQGGITLMMDRLSNPAKLRAYALSEQLKEIMAPLFQKHMDDIISGEFSSGMMADWANDDKKLLTWREETGKTAFETAPQYEGKIGEQEYFDKGVLMIAMVKAGVELAFETMVASGIIEESAYYESLHELPLIANTIARKRLYEMNVVISDTAEYGNYLFSYACVPLLKPFMAELQPGDLGKAIPEGAVDNAQLRDVNDAIRGHAIEQVGKKLRGYMTDMKRIAVAG

SEQ ID NO: 607 - protein, 491 aa, Escherichia coli
MANYFNTLNLRQQLAQLGKCRFMGRDEFADGASYLQGKKVVIVGCGAQGLNQGLNMRDSGLDISYALRKEAIAEKRASWRKATENGFKVGTYEELIPQADLVINLTPDKQHSDVVRTVQPLMKDGAALGYSHGFNIVEVGEQIRKDITVVMVAPKCPGTEVREEYKRGFGVPTLIAVHPENDPKGEGMAIAKAWAAATGGHRAGVLESSFVAEVKSDLMGEQTILCGMLQAGSLLCFDKLVEEGTDPAYAEKLIQFGWETITEALKQGGITLMMDRLSNPAKLRAYALSEQLKEIMAPLFQKHMDDIISGEFSSGMMADWANDDKKLLTWREETGKTAFETAPQYEGKIGEQEYFDKGVLMIAMVKAGVELAFETMVDSGIIEESAYYESLHELPLIANTIARKRLYEMNVVISDTAEYGNYLFSYACVPLLKPFMAELQPGDLGKAIPEGAVDNAQLRDVNEAIRCHAIEQVGKKLRGYMTDMKRIAVAG

SEQ ID NO: 608 - protein, 491 aa, Escherichia coli
MANYFNTLNLRQQLAQLGKCRFMGRDEFADGASYLQDKKVVIVGCGAQGLNQGLNMRDSGLDISYALRKEAIAEKRASWRKATENGFKVGTYEELIPQADLVVNLTPDKQHSDVVRTVQPLMKDGAALGYSHGFNIVEVGEQIRKDITVVMVAPKCPGTEVREEYKRGFGVPTLIAVHPENDPKGEGMAIAKAWAAATGGHRAGVLESSFVAEVKSDLMGEQTILCGMLQAGSLLCFDKLVEEGTDPAYAEKLIQFGWETITEALKQGGITLMMDRLSNPAKLRAYALSEQLKEIMAPLFQKHMDDIISGEFSSGMMADWANDDKKLLTWREETGKTAFETAPQYEGKIGEQEYFDKGVLMIAMVKAGVELAFETMVDSGIIEESAYYESLHELPLIANTIARKRLYEMNVVISDTAEYGNYLFSYACVPLLKPFMAELQPGDLGKAIPEGAVDNAQLRDVNEAIRSHAIEQVGKKLRGYMTDMKRIAVAG

SEQ ID NO: 609 - protein, 491 aa, Shigella dysenteriae
MANYFNTLNLRQQLAQLGKCRFMGRYEFADGASYLQGKKVVIVGCGAQGLNQGLNMRDSGLDISYALRKEAIAEKRASWRKATENGFKVGTYEELIPQADLVVNLTPDKQHSDVVRTVQPLMKDGAALGYSHGFNIVEVGEQIRKDITVVMVAPKCPGTEVREEYKRGFGVPTLIAVHPENDPKGEGMAIAKAWAAATGGHRAGVLESSFVAEVKSDLMGEQTILCGMLQAGSLLCFDKLVEEGTDPAYAEKLIQFGWETITEALKQGGITLMMDRLSNPAKLRAYALSEQLKEIMAPLFQKHMDDIISGEFSSGMMADWANDDKKLLTWREETGKTAFETALQYEGKIGEQEYFDKGVLMIAMVKAGVELAFETMVDSGIIEESAYYESLHELPLIANTIARKRLYEMNVVISDTAEYGNYLFSYACVPLLKPFMAELQPGDLGKAIPEGAVDNAQLRDVNEAIRSHAIEQVGKKLRGYMTDMKRIAVAG

SEQ ID NO: 610 - protein, 491 aa, Salmonella enterica
MANYFNTLNLRQQLAQLGKCRFMGRDEFADGASYLQGKKVVIVGCGAQGLNQGLNMRDSGLDIAYALRKEAIAEKRASWRKATENGFKVGTYEELIPQADLVVNLTPDKQHSDVVRSVQPLMKDGAALGYSHGFNIVEVGEQIRKDITVVMVAPKCPGTEVREEYKRGFGVPTLIAVHPENDPQGEGMAIAKAWAAATGGHRAGVLESSFVAEVKSDLMGEQTILCGMLQAGSLLCFDKLVAEGTDPAYAEKLIQFGWETITEALKQGGITLMMDRLSNPAKLRAYALSEQLKEIMAPLFQKHMDDIISGEFSSGMMADWANDDKKLLTWREETGKTAFETAPQFEGKIGEQEYFDKGVLMIAMVKAGVELAFETMVDSGIIEESAYYESLHELPLIANTIARKRLYEMNVVISDTAEYGNYLFSYACVPLLKPFMAELQPGDLGSAIPEGAVDNAQLRDVNDAIRSHAIEQVGKKLRGYMTDMKRIAVAG

SEQ ID NO: 611 - protein, 491 aa, Providencia alcalifaciens
MTNYFNTLNLREQLAQLGKCRFMNRDEFADEAGYLKGKKIVIVGCGAQGLNQGLNMRDSGLDIAYALRPEAIKEKRASWRKATENGFKVGTYEELIPEADLVVNLTPDKQHSTVVRAVQPMMKQGAALGYSHGFNIVEVGEEIRKDITVVMVAPKCPGTEVREEYKRGFGVPTLIAVHPENDPKGEGMAIAKAWAAATGGHRAGVLESSFVAEVKSDLMGEQTILCGMLQAGALLSYDKMVADGVEPGYAGKLIQFGWETITEALKQGGITLMMDRLSNPAKIRAYALSEQLKTILAPLFQKHMDDIISGEFSSTMMADWANNDKNLLTWREETGKSAFENYPEFAGKISEQEYFDHGVLLVAMVKAGVELAFDTMLEAGILEESAYYESLHELPLIANTIARKRLYEMNVVISDTAEYGNYLFSFAAVPMLKEFMTKLQAGDLAKSVADNGTDNAQLRDINEAIRNHPIEKIGKTLRGYMTDMKKISSAQ

SEQ ID NO: 612 - protein, 491 aa, Unknown
  Flavobacteria bacterium
MANYFNTLSLREQLTQLGKCRFMESSEFSDGVEALKGKKIVIVGCGAQGLNQGLNMRDSGLDISYTLRAEAIAQKRASFINATENNFKVGTYEALIPHADVVINLTPDKQHTAVVTAVMPLMKQGATLSYSHGFNIVEEGMQVRKDLTVIMVAPKCPGSEVREEYKRGFGVPTLIAVHPDNDPQGVGLAQAKAYAVATGGDRAGVLESSFVAEVKSDLMGEQTILCGLLQTGSILCFDKMVEKGMDKGYAAKLIQYGWEAITEGLKYGGITHMMDRLSNPAKIKAYELSEELKDIMRPLFNKHMDDIISGHFSKTMMEDWANDDKNLLEWRAATGETAFEKTPISSETITEQAFYDHGVLMVAMVRAGVELAFEAMTASGIIEESAYYESLHETPLIANTIARKKLFEMNRVISDTAEYGCYLFDHACKPLLADFMTRIDTDVIGTAYGRGTDNKVSNTQLVTINAALRNHPVEIVGARLRASMTAMKPIV

SEQ ID NO: 613 - protein, 491 aa, Proteus penneri
MANYFNTLNLRQQLSQLGKCRFMSREEFADEANYLKGRKVVIVGCGAQGLNQGLNMRDSGLNIAYALRQEAIDEKRASWRRATENGFEVGTYEALIPQADLVVNLTPDKQHSAVVQAVQPLMKSGAALGYSHGFNIVEVGEKIRDDITVVMVAPKCPGTEVREEYKRGFGVPTLIAVHPENDAKGEGMAIAKAWAAATGGHRAGVLESSFVAEVKSDLMGEQTILCGMLQAGSLLCYDKMVADGVEPGYAGKLIQFGWETITEALKQGGITLMMDRLSNPAKMRAYALSEQLKEIMAPLFAKHMDDIISGKFSETMMADWANDDKNLLTWREETGASAFENYPEYEGKISEQEYFDHGVLMVAMVKAGVELAFDTMIEAGIFAESAYYESLHELPLIANTIARKRLYEMNVVISDTAEYGNYLFSFAVVPMLKEFMTTLQSGDLAKKVQDNGTDNAQLRDINEAIRQHPIEAVGKTLRGYMTDMKKIAVGN

SEQ ID NO: 614 - protein, 491 aa, Proteus mirabilis
MANYFNTLNLRQQLSQLGKCRFMSRDEFADEANYLKGKKVVIVGCGAQGLNQGLNMRDSGLDIAYALRQEAIDEKRASWRRATENGFEVGTYEALIPQADLVVNLTPDKQHSAVVQAVQPLMKSGAALGYSHGFNIVEVGEKIRDDITVVMVAPKCPGTEVREEYKRGFGVPTLIAVHPENDAKGEGMAIAKAWAAATGGHRAGVLESSFVAEVKSDLMGEQTILCGMLQAGSLLCYDKMVAEGVEPGYAGKLIQFGWETITEALKQGGITLMMDRLSNPAKMRAYALSEQLKEIMAPLFAKHMDDIISGKFSETMMADWANDDKNLLTWREETGASAFENYPEYEGKISEQEYFDHGVLMVAMVKTGVELAFDTMIEAGIIAESAYYESLHELPLIANTIARKRLYEMNVVISDTAEYGNYLFSFAAVPMLKEFMTTLQSGDLAKHVPDSGTDNAQLRDINEAIRQHPIEIVGKKLRGYMTDMKKIAVAN

SEQ ID NO: 615 - protein, 491 aa, Citrobacter sp.
MANYFNTLNLRQQLAQLGKCRFMGRDEFADGASYLQGKKVVIVGCGAQGLNQGLNMRDSGLDISYALRKEAIAEKRASWRKATENGFKVGTYEELIPQADLVVNLTPDKQHSDVVRSVQPLMKDGAALGYSHGFNIVEVGEQIRKDITVVMVAPKCPGTEVREEYKRGFGVPTLIAVHPENDPKGEGMAIAKAWAAATGGHRAGVLESSFVAEVKSDLMGEQTILCGMLQAGSLLCFDKLVEEGTDPAYAEKLIQFGWETITEALKQGGITLMMDRLSNPAKLRAYALSEQLKEIMAPLFQKHMDDIISGEFSSGMMADWANDDKKLLTWREETGKTAFETAAQFDGKIGEQEYFDKGVLMIAMVKAGVELAFETMVDSGIIEESAYYESLHELPLIANTIARKRLYEMNVVISDTAEYGNYLFSYACVPLLKEFMTTLQTGDLGKAIAEGAVDNAQLRDVNDAIRGHAIEKVGQKLRGYMTDMKRIAVAG

SEQ ID NO: 616 - protein, 491 aa, Salmonella enterica
MANYFNTLNLRQQLAQLGKCRFMGRDEFADGASYLQGKKVVIVGCGAQGLNQGLNMRDSGLDISYALRKEAIAEKRASWRKATENGFKVGTYEELIPQADLVVNLTPDKQHSDVVRSVQPLMKDGAALGYSHGFNIVEVGEQIRKDITVVMVAPKCPGTEVREEYKRGFGVPTLIAVHPENDPQGEGMAIAKAWAAATGGHRAGVLESSFVAEVKSDLMGEQTILCGMLQAGSLLCFDKLVAEGTDPAYAEKLIQFGWETITEALKQGGITLMMDRLSNPAKLRAYALSEQLKEIMAPLFQKHMDDIISGEFSSGMMADWANDDKKLLTWREETGKTAFETAPQYEGKIGEQEYFDKGVLMIAMVKAGVELAFETMVDSGIIEESAYYESLHELPLIANTIARKRLYEMNVVISDTAEYGNYLFSYACVPLLKPFMAELQPGDLGSAIPEGAVDNAQLRDVNDAIRSHAIELVGKKLRGYMTDMKRIAVAG

SEQ ID NO: 617 - protein, 491 aa, Pasteurella dagmatis
MANYFNTLNLRQQLDQLGRCRFMDRNEFANEAEYLKGKKIVIVGCGAQGLNQGLNMRDSGLDISYALRPEAIAEKRASFQRATENGFKVGTYQELIPTADLVVNLTPDKQHSKVVADVMPLMKQGAALGYSHGLNIVEVGEQIRKDITVVMVAPKCPGTEVREEYKRGFGVPTLIAVHPENDPNGDGLEIAKAWAAATGGHRAGVLESSFVAEVKSDLMGEQTILCGMLQAGSIVCYDKLVADGKDPAYAGKLIQYGWETITEALKHGGITLMMDRLSNSAKLRAFELSEQIKEKMTALFEKHMDDILSGEFSSTMMTDWANGDANLLKWREETGKTAFENAPKYEGKISEQEYFDHGVLMVAIVKAGVELAFDTMVASGIYEESAYYESLHELPLIANTIARKRLYEMNVVISDTAEYGNYLFANVAAPILAKEIVPTLQKGDLGEPTPTVEIDNIILRNVNDAIRNHPIELVGQELRGYMTDMKRISSN

SEQ ID NO: 618 - protein, 491 aa, Enterobacter cancerogenus
MANYFNTLNLRQQLAQLGKCRFMGREEFADGASYLQGKKVVIVGCGAQGLNQGLNMRDSGLDISYALRKEAIAEKRASWRKATENGFKVGTYEDLIPQADLVVNLTPDKQHSDVVRAVQPLMKDGAALGYSHGFNIVEVGEQIRKDITVVMVAPKCPGTEVREEYKRGFGVPTLIAVHPENDPKGEGMAIAKAWAAATGGHRAGVLESSFVAEVKSDLMGEQTILCGMLQAGSLLCFDKLVEEGTDPAYAEKLIQFGWETITEALKQGGITLMMDRLSNPAKLRAYALSEQLKTIMAPLFQKHMDDIISGEFSSGMMADWANDDKNLLTWREETGKTAFETAPQFDGKISEQEYFDKGVLMIAMVKAGVELAFETMVDSGIIEESAYYESLHELPLIANTIARKRLYEMNVVISDTAEYGNYLFSYACVPLLKEFMTTLQAGDLGKAIAEGAVDNAQLRDVNEAIRSHEIEKVGQKLRGYMTDMKRIAVAG

SEQ ID NO: 619 - protein, 491 aa, Providencia rustigianii
MANYFNTLNLRDQLAQLGKCRFMNRDEFADEAGYLKGKKIVIVGCGAQGLNQGLNMRDSGLDIAYALRPEAISEKRASWRKATENGFKVGTYEELIPEADLVINLTPDKQHSTVVRAVQPMMKQGAALGYSHGFNIVEVGEEIRKDITVVMVAPKCPGTEVREEYKRGFGVPTLIAVHPENDPKGEGMAIAKAWAAATGGHRAGVLESSFVAEVKSDLMGEQTILCGMLQAGALLSYDKMVADGVEPGYAGKLIQFGWETITEALKQGGITLMMDRLSNPAKVRAYALSEQLKTILAPLFQKHMDDIISGEFSSTMMADWANNDKNLLTWREETGQSSFENYPESTAKISEQEYFDHGVLLVAMVKAGVELAFDTMLEAGILEESAYYESLHELPLIANTIARKRLYEMNVVISDTAEYGNYLFSFAAVPMLKEFMTKLQAGDLAKPVADNGTDNAQLRDINEAIRNHPIEKIGKTLRGYMTDMKKIAVAH

SEQ ID NO: 620 - protein, 491 aa, Serratia odorifera
MANYFNTLNLRQQLAQLGKCRFMARDEFADEAGYLKGKKVVIVGCGAQGLNQGLNMRDSGLDVAYALRKEAIDEKRPSWRKATENGFKVGTYEDLIPQADLVVNLTPDKQHTSVVRAVQPLMKDGAALGYSHGFNIVEVGEQVRKDITVVMVAPKCPGTEVREEYKRGFGVPTLIAVHPENDPKGEGMAIAKAWAAATGGHRAGVLESSFVAEVKSDLMGEQTILCGMLQAGSLLCFDKLVAEGTEPAYAEKLIQFGWETITEALKQGGITLMMDRLSNPAKLRAYALSEQLKEIMAPLFQKHMDDIISGAFSSGMMADWAEDDVKLLNWREETGKSAFENAPQFEGKISEQEYFDNGVLMVAMVKAGVELAFETMVDAGIIEESAYYESLHELPLIANTIARKRLYEMNVVISDTAEYGNYLFANAAVPLLKEFMTTLQAGDLGKSVAGTSVDNAQLRDVNEAVRNHPIESVGRKLRGYMTDMKRIAVAG

SEQ ID NO: 621 - protein, 491 aa, Citrobacter youngae
MANYFNTLNLRQQLAQLGKCRFMGRDEFADGASYLQGKKVVIVGCGAQGLNQGLNMRDSGLDIAYALRKEAIAEKRASWRKATENGFKVGTYEELIPQADLVVNLTPDKQHSDVVRSVQPLMKDGAALGYSHGFNIVEVGEQIRKDITVVMVAPKCPGTEVREEYKRGFGVPTLIAVHPENDPKGEGMAIAKAWAAATGGHRAGVLESSFVAEVKSDLMGEQTILCGMLQAGSLLCFDKLVAEGTDPAYAEKLIQFGWETITEALKQGGITLMMDRLSNPAKLRAYALSEQLKEIMAPLFQKHMDDIISGEFSSGMMADWANDDKKLLTWREETGKTAFETAPQFEGKIGEQEYFDKGVLMIAMVKAGVELAFETMVDSGIIEESAYYESLHELPLIANTIARKRLYEMNVVISDTAEYGNYLFSYACVPLLKEFMTTLQTGDLGKAIAEGAVDNAQLRDVNDAIRGHAIEKVGQKLRGYMTDMKRIAVAG

SEQ ID NO: 622 - protein, 491 aa, Serratia odorifera
MANYFNTLNLRQQLAQLGKCRFMARDEFADEAGYLKGKKVVIVGCGAQGLNQGLNMRDSGLDVAYALRKEAIEEKRASWRKASENGFKVGTYEELIPQADLVVNLTPDKQHSAVVRAVQPLMKDGAALGYSHGFNIVEVGEQVRKDITVVMVAPKCPGTEVREEYKRGFGVPTLIAVHPENDPKGEGMAIAKAWAAATGGHRAGVLESSFVAEVKSDLMGEQTILCGMLQAGSLLCFDKLVAEGRDPAYAEKLIQFGWETITEALKQGGITLMMDRLSNPAKLRAYALSEQLKAIMAPLFQKHMDDIISGAFSSGMMADWAEDDVKLLTWREETGKTAFENAPQFEGKISEQEYFDNGVLMVAMVKAGVELAFETMVDSGIIEESAYYESLHELPLIANTIARKRLYEMNVVISDTAEYGNYLFSYAAVPLLKDFMNTLQAGDLGQSVAGTSVDNAQLRDVNEAVRNHPIESVGRKLRGYMTDMKRIAVAG

SEQ ID NO: 623 - protein, 491 aa, Escherichia coli
MANYFNTLNLRQQLAQLGKCRFMGRDEFADGASYLQGKKVVIVGCGAQGLNQGLNMRDSGLDISYALRKEAIAEKRASWRKATENGFKVGTYEELIPQADLVINLTPDKQHSDVVRTVQPLMKDGAALGYSHGFNIVEVGEQIRKDITVVMVAPKCPGTEVREEYKRGFGVPTLIAVHPENDPKGEGMAIAKAWAAATGGHRAGVLESSFVAEVKSDLMGEQTILCGMLQAGSLLCFDKLVEEGTDPAYAEKLIQFGWETITEALKQGGITLMMDRLSNPAKLRAYALSEQLKEIMAPLFQKHMDDIISGEFSSGMMADWANDDKKLLTWREETGKTAFETAPQYEGKIGEQEYFDKGVLMIAMVKAGVELAFETMVDSGIIEESAYYESLHELPLIANTIARKRLYEMNVVISDTAEYGNYLFSYACVPLLKPFMAELQPGDLGKAISEGAVDNGQLRDVNEAIRSHAIEQVGKKLRGYMTDMKRIAVAG

SEQ ID NO: 624 - protein, 491 aa, Pantoea sp.
MANYFNTLNLRNQLAQLGKCRFMARDEFADGASFLKGKKVVIVGCGAQGLNQGLNMRDSGLDVAYALRAEAIAEKRPSWRKATDNGFKVGTYEELIPQADLVVNLTPDKQHSAVVQAVQPLMKDGAALGYSHGFNIVEVGESIRKDITVVMVAPKCPGTEVREEYKRGFGVPTLIAVHPENDPKGEGMAIAKAWAAATGGDRAGVLESSFVAEVKSDLMGEQTILCGMLQAGSLLCFDKLVAEGTDPAYAEKLIQFGWETITESLKFGGITLMMDRLSNPAKLRAYALSEQLKTIMAPLFQKHMDDIISGEFSSGMMADWANDDKNLLTWREETGQTAFETAAQYEGKIEEQEYYDKGVVMVAMVKAGVELAFETMVDAGIIEESAYYESLHELPLIANTIARKRLYEMNVVISDTAEYGNYLFSFAAVPLLKEFMTTLQPGDLGKAVEGTQVDNAQLRDVNEAVRQHPIETVGRKLRGYMTDMKRIAVAG

SEQ ID NO: 625 - protein, 491 aa, Escherichia coli
MANYFNTLNLRQQLAQLGKCRFMGRDEFADGASYLQGKKVVIVGCGAQGLNQGLNMRDSGLDISYALRKEAIAEKRASWRKATENGFKVGTYEELIPQADLVVNLTPDKQHSDVVRTVQPLMKDGAALGYSHGFNIVEVGEQIRKDITVVMVAPKCPGTEVREEYKRGFGVPTLIAVHPENDPKGEGMAIAKAWAAATGGHRAGVLESSFVAEVKSDLMGEQTILCGMLQAGSLLCFDKLVEEGTDPAYAEKLIQFGWETITEALKQGGITLMMDRLSNPAKLRAYALSEQLKEIMAPLFQKHMDDIISSEFSSGMMADWANDDKKLLTWREETGKTAFETAPQYEGKIGEQEYFDKGVLMIAMVKAGVELAFETMVDSGIIEESAYYESLHELPLIANTIARKRLYEMNVVISDTAEYGNYLFSYACVPLLKPFMAELQPGDLGKAIPEGAVDNAQLRDVNEAIRSHAIEQVGKKLRGYMTDMKRIAVAG

SEQ ID NO: 626 - protein, 491 aa, Escherichia coli
MANYFNTLNLRQQLAQLGKCRFMGRDEFADGASYLQGKKVVIVGCGAQGLNQGLNMRDSGLDISYALRKEAIAEKRASWRKATENGFKVGTYEELIPQADLVVNLTPDKQHSDVVRSVQPLMRDGAALGYSHGFNIVEVGEQIRKDITVVMVAPKCPGTEVREEYKRGFGVPTLIAVHPENDPKGEGMAIAKAWAAATGGHRAGVLESSFVAEVKSDLMGEQTILCGMLQAGSLLCFDKLVEEGTDPAYAEKLIQFGWETITEALKQGGITLMMDRLSNPAKLRAYALSEQLKEIMAPLFQKHMDDIISGEFSSGMMADWANDDKKLLTWREETGKTAFETAPQYEGKIGEQEYFDKGVLMIAMVKAGVELAFETMVDSGIIEESAYYESLHELPLIANTIARKRLYEMNVVISDTAEYGNYLFSYACVPLLKPFMAELQPGDLGKAIPEGAVDNAQLRDVNEAIRSHAIEQVGKKLRGYMTDMKRIAVAG

SEQ ID NO: 627 - protein, 491 aa, Serratia symbiotica
MANYFNSLNLRQQLAQLGQCRFMARDEFADEADYLKGKKVVIIGCGAQGLNQGLNMRDSGLDVAYALRQEAIDEKRASWRKASENGFNVGTYEELIPLADLVVNLTPDKQHSFVVRAVQPLMKDVAALGYSHGFNIVEMGEQVRKDITVVMVAPKCPGTEVREEYKRGFGVPTLIAVHPENDPKGEGMAIAKAWAAATGGHRAGVLGSSFVAEVKSDLMGEQTILCGMLQAGSLVCFDKLVAEGTDPAYAEKLIQFGWETITEALKQGGITLMMDRLSNPAKLRAYVLSEQLKEIMAPLFQKHMDDIISGAFSSGMMADWAEDDVKLLAWRADSGQTAFENAPQFAGKISEQEYFDHGVLMVAMVKAGVELAFETMVDAGIIAESAYYESLHELPLIANTIARKRLYEMNVVISDTAEYGNYLFANAAVPLLQRFMTTLQVGDLGKPVASTRVDNAQLRDVNEAVRNHPIESIGRTLRGYMTDMKRIAVAG

SEQ ID NO: 628 - protein, 491 aa, Plautia stali
MANYFNTLNLRNQLAQLGKCRFMSRDEFADGASFLKGKKVVIVGCGAQGLNQGLNMRDSGLDVSYALRAEAIAEKRASFRKATENGFKVGTYEELIPQADLVVNLTPDKQHSAVVQAVQPLMKDGAALGYSHGFNIVEVGETIRKDITVVMVAPKCPGTEVREEYKRGFGVPTLIAVHPENDPKGEGMAIAKAWAAATGGDRAGVLESSFVAEVKSDLMGEQTILCGMLQAGSLLCFDKLVAEGHDAAYTEKLIQFGWETITESLKFGGITLMMDRLSNPAKIRAYALSEQLKTIMEPLFQKHMDDIISGEFSSGMMADWANDDKKLLTWREETGKTAFENAPQFEGKIDEQEYYDKGVVMVAMVKAGVELAFETMVDAGIIEESAYYESLHELPLIANTIARKRLYEMNVVISDTAEYGNYLFSFAAVPLLKEFMTTLQPGDLGKAVEGTQVDNAQLRDVNEAIRQHPIEAVGRKLRGYMTDMKRIAVAG

SEQ ID NO: 629 - protein, 491 aa, Escherichia coli
MANYFNTLNLRQQLTQLGKCRFMGRDEFADGASYLQGKKVVIVGCGAQGLNQGLNMRDSGLDISYALRKEAIAEKRASWRKATENGFKVGTYEELIPQADLVVNLTPDKQHSDVVRTVQPLMKDGAALGYSHGFNIVEVGEQIRKDITVVMVAPKCPGTEVREEYKRGFGVPTLIAVHPENDPKGEGMAIAKAWAAATGGHRAGVLESSFVAEVKSDLMGEQTILCGMLQAGSLLCFDKLVEEGTDPAYAEKLIQFGWETITEALKQGGITLMMDRLSNPAKLRAYALSEQLKEIMAPLFQKHMDDIISGEFSSGMMADWANDDKKLLTWREETGKTAFETAPQYEGKIGEQEYFDKGVLMIAMVKAGVELAFETMVDSGIIEESAYYESLHELPLIANTIARKRLYEMNVVISDTAEYGNYLFSYACVPLLKPFMAELQPGDLGKAIPEGAVDNAQLRDVNEAIRSHAIEQVGKKLRGYMTDMKRIAVAG

SEQ ID NO: 630 - protein, 491 aa, Enterobacter hormaechei
MANYFNTLNLRQQLAQLGKCRFMARDEFADGASYLQGKKVVIVGCGAQGLNQGLNMRDSGLDISYALRKEAIAEKRASWRKATENGFKVGTYEELIPQADLVVNLTPDKQHSDVVRSVQPLMKDGAALGYSHGFNIVEVGEQIRKDITVVMVAPKCPGTEVREEYKRGFGVPTLIAVHPENDPKGEGMAIAKAWAAATGGHRAGVLESSFVAEVKSDLMGEQTILCGMLQAGSLLCFDKLVEEGTDPAYAEKLIQFGWETITEALKQGGITLMMDRLSNPAKLRAFALSEQLKTIMAPLFQKHMDDIISGEFSSGMMADWANDDKKLLTWREETGKTAFETAPQYDGKITEQEYFDKGVLMIAMVKAGVELAFETMVDSGIIEESAYYESLHELPLIANTIARKRLYEMNVVISDTAEYGNYLFSYACVPLLKEFMTTLQAGDLGQAIAEGAVDNAQLRDVNEAIRSHEIEKVGQKLRGYMTDMKRIAVAG

SEQ ID NO: 631 - protein, 491 aa, Rheinheimera sp.
MSNYFNTLNLRQQLKQLGKCRFMAKEEFAKGSDLLKGWKVVIVGCGAQGLNQGLNMRDSGIDISYALRAEAIAAKRKSFQNASDNGFKVGTYEELIPTADLVLNLTPDKQHTSVVKAVMPLMKQGSTLAYSHGFNIVEEGTQIRKDITVVMVAPKCPGTEVREEYKRGFGVPTLIAVHPENDPKGLGLEIAKAYASATGGDRAGVLESSFVAEVKSDLMGEQTILCGMLQTGSILAYDKLVAEGVEPGYAAKLIQFGWETVTEALKHGGITHMMDRLSNPAKIKAYDLAEELKVTLRPLFEKHMDDIISGEFSRTMMADWANDDKQLFGWREETRQSGFENAPVSSEQIPEQDYFDRGILFVAMVKAGVELAFETMVAAGIVEESAYYESLHETPLIANTIARKRLYEMNVVISDTAEYGNYLFSNAAVPLLRDFVNTLSTDYVGKGLSSAANGVDNIRLIAVNEAIRQHPVELVGKKLRGYMTAMKKIVG

SEQ ID NO: 632 - protein, 490 aa, Buchnera aphidicola
MNYFNTLNFTQKINQINKCRFMKKEEFNKKNDILKNKNIVIVGCGAQGLNQGLNMRDAGLNVSYALKKNSIANKNQSWINAIENNFKVDDYDALIPDADLVINLTPDKQHHSVIKKLQKLMKKNAVLGYSHGFNIVEFGEKIRKDITVIMVAPKCPGTEVREEYKRGFGVPTLIAVHHENDINKIGLEVAKAWAFSTGGHRAGVLESSFIAEVKSDLMGEQTILCGMLQTASLLCYEKLITEKCNPAYSAKLIQNGWETITESLKHGGITLMMDRLSNSSKIRAYKLSKEIKKILSPLFQKHMDDIISGEFSNEMMKDWENQDLKLLNWRYKTKNTSFETAPVYNEKIPEQEYYDHGILMIAILKSGIELSFEKMIETGIKEESAYYESLHELPLIANTIARKKLYEMNKVISDTAEYGSYLFSESAYPILKEFISTLNKSDLGCALSHQSVNNIELYRINQKIQNHPIEIIGCTLRNYMKKMKAITVAK

SEQ ID NO: 633 - protein, 490 aa, Buchnera aphidicola
MNYFNTLNFTQKINQINKCRFMKKEEFNKKNDILKNKNIVIVGCGAQGLNQGLNMRDAGLNISYALKKNSIANKNQSWINAIENNFKVDDYDALIPDADLVINLTPDKQHHSVIKKLQKLMKKNAVLGYSHGFNIVEFGEKIRKDITVIMVAPKCPGTEVREEYKRGFGVPTLIAVHHENDINKIGLEVAKAWAFSTGGHRAGVLESSFIAEVKSDLMGEQTILCGMLQTASLLCYEKLITEKCNPAYSAKLIQNGWETITESLKHGGITLMMDRLSNSSKIRAYKLSKEIKKILSPLFQKHMDDIISGEFSNEMMKDWENQDLKLLNWRYKTKNTSFETAPVYNEKIPEQEYYDHGILMIAILKSGIELSFEKMIKTGIKEESAYYESLHELPLIANTIARKKLYEMNKVISDTAEYGSYLFSESAYPILKEFISTLNKSDLGCALSHQSVNNIELYRINQKIQNHPIEIIGCTLRNYMKKMKAITVAK

SEQ ID NO: 634 - protein, 490 aa, Buchnera aphidicola
MNYFNALNFSQKINQIKKCRFMKKNEFNNKNNILKNKNIVIVGCGAQGLNQGLNMRDSGLNISFALKKNSILKKNQSWINATENNFKVDDYESLIPNADLVINLTPDKEHHNVVTTLQKLMKKNSYLGYSHGFNIVEFGEIIRKDITVIMVAPKCPGTEVREEYKRGFGVPTLIAVHNENDIHQKGLEIAKAWSFSIGSHRAGVLESSFIAEVKSDLMGEQTILCGMLQTASILCYEKLITNKHDPAYAAKLIQNGWETITESLKHGGITLMMDRLSNPSKIRAYKISEKIKKILTSLFQQHMNNIISGEFSSEMMKDWKNNDKKLLDWRKQTKDTSFEKAPIYIKKIPEQEYYDHGILMIAILKAGIELSFETMINSGIIAESAYYESLHELPLIANTIARKKLYEMNKVISDTAEYGSYLFFESAYPILKKFISTTHIYDLGSSLLNQSTNNIELYQINDMIRNHPIEIIGRKLRSYMKEMKEITVAK

SEQ ID NO: 635 - protein, 490 aa, Buchnera aphidicola
MNYFNTLNFSQKINQINKCRFMKKEEFNKKNDILKNKNIVIVGCGSQGLNQGLNMRESGLNISYALKKNSILQKNQSWINAIQNNFKVDSYESLIPSADLVINLTPDKQHHNVIKDLQKLMKKNSFLGYSHGFNIVEFGEKIRKDITVIMVAPKCPGTEVREEYKRGFGVPTLIAVHHENDINKMGLEIAKAWAFSTGGHRAGVLESSFVAEVKSDLMGEQTILCGILQTASLLCYEKLITEKHDPAYAAKLIQYGWETITESLKHGGITLMMNRLSNTSKIRAYKLCEKIKKILSPLFQKHMDDIISGKFSTEMMKDWENNDERLLNWRNNTKNTSFEKAPIYNDKIIEQEYYDHGILMIAILKSGIELSFEKMIKTGIIEESAYYESLHELPLIANTIARKKLYEMNKVISDTAEYGSYLFSESAYPILKKFILTLEKSDLGCSLPHQLVDNIELHKINETIQNHPIEIVGRKLRSYMKKMKTIAVAK

SEQ ID NO: 636 - protein, 490 aa, Halomonas sp.
MANYFNTLPLREQLAQLAQCRFMHTVEFADGVEALKGKKMVVIGCGAQGLNQGLNLRDSGLDVSYALRPEAIEQKRQSWKNASENGFVVGTYQELIPTADVVLNLTPDKQHTSVVNAVMPLMKEGACLSYSHGFNIVEEGMKIRDDLTVIMVAPKCPGSEVRAEYVRGFGVPTLIAVHEDNDPKGEGLALAKAYAVGTGGHKAGVLMSSFIAEVKSDLMGEQTILCGMLQTGSLLCFDKMIEEGIDPGYASRLIQYGWETVTEALKYGGVTNMLDRLSNPAKIKAFDLSEELKVIMRPLYNKHQDDIMSGHFSKTMMEDWANDDANLLKWRAETAETNFEKTPAGDVEITEQEFFDNGILMVAMVKAGVELAFETMTAAGIIAESAYYESLHETPLIANTIARKKLYEMNATISDTAEYGCYLYNHACVPLLADFMKGIKSDVIGKGLSLDDNGVDNARLIEVNTALRSHPVEAVGSVLRGYMADMKKIV

SEQ ID NO: 637 - protein, 490 aa, Buchnera aphidicola; identical to SEQ ID NO: 74

SEQ ID NO: 638 - protein, 490 aa, Buchnera aphidicola
MNYFNTLNFTQKINQINKCRFMKKEEFNKKNDILKNKNIVIVGCGAQGLNQGLNMRDAGLNISYALKKNSIANKNQSWINAIENNFKVDDYDALIPDADLVINLTPDKQHHSVIKKLQKLMKKNAVLGYSHGFNIVEFGEKIRKDITVIMVAPKCPGTEVREEYKRGFGVPTLIAVHHENDINKIGLEVAKAWAFSTGGHRAGVLESSFIAEVKSDLMGEQTILCGMLQTASLLCYEKLITEKCNPAYSAKLIQNGWETITESLKHGGITLMMDRLSNSSKIRAYKLSKEIKKILSPLFQKHMDDIISGEFSNEMMKDWENQDLKLLNWRYKTKNTSFETAPVYNEKIPEQEYYDHGILMIAILKSGIELSFEKMIETGIKEESAYYESLHELPLIANTIARKKLYEMNKVISDTAEYGSYLFSESAYPILKEFISTLNKSDLGCALSHQSVNNIELYRINQKIQNHPIEIIGCTLRNYMKKMKAITVAK

SEQ ID NO: 639 - protein, 490 aa, Marinomonas sp.
MANYFNTLPLREQLAQLAKCRFMDSSEFADGVEALKGKKMVVIGCGAQGLNQGLNLRDSGLDVSYALRPEAIAQKRQSWKNATENGFVVGTYEELIPTADVVLNLTPDKQHTPVVKAVMPLMKEGACLSYSHGFNIVEEGMQIREDLTVIMVAPKCPGSEVRAEYVRGFGVPTLIAVHEDNDPKGEGLALAKAYAVGTGGHKAGVLMSSFIAEVKSDLMGEQTILCGMLQTGSILCFDKMVEEGIDAGYASRLIQYGWETITEALKYGGVTNMLDRLSNPAKIKAFDLSEELKVIMRPLYNKHQDDIISGHFSQTMMEDWANDDKNLLQWRADTAETNFEKTPAGDVEISEQEFFDNGILMVAMVKAGVELAFETMTAAGIIAESAYYESLHETPLIANTIARKKLYEMNATISDTAEYGCYLYNHACVPLLADFMKDIKTDVIGKGLSVEDNGVDNARLIEVNKALRSHPVEAVGAVLRGHMADMKKIV

SEQ ID NO: 640 - protein, 490 aa, Geobacter bemidjiensis
MGVNYFNTLPLRRQLQELGTCRFMDASEFANGCEYVKGKKIVIVGCGAQGLNQGLNMRDSGLDVSYTLRKEAIEQKRQSYLNASENGFKVGSYEELLPGADIVMNLAPDKQHSNVVDTVIPFMKQGAVFSYAHGFNIVEEGTQIRKDLTVVMVAPKCPGSEVRAEYKRGFGVPTLIAVHGENDPNGDGLEIAKALASAQGGDRAGVLESSFVAEVKSDLMGEQTILCGMLQAGALLCFDKMTQNGIAAPYAVKLIQYGWETITEALKHGGITNMMDRLSNPAKLIAFKLADELKDIMRPLFQKHMDDIMSGEFSRTMMEDWANDDVKLLTWREQTGQTAFEKTEAAGEISEQEYFDKAILMVAMVKAGVELAFETMVQTGIEPESAYYESLHETPLIANTIARKKLYEMNRVISDTAEYGCYLFSHACVPLLKDFMSKVGTDVIGKGLAAKDNSVDNQLLVAVNAEIRSHLVEEVGAELRAAMKGMQKIV

SEQ ID NO: 641 - protein, 490 aa, Desulfobacterium autotrophicum
MGKNYFNGLPLRLQLEELSQCRFMDASEFNGVEALKGKKIVIVGCGAQGLHQGLNLRDSGLDVSYTLRESAISEKRQSWKNATENGFSVGTYETMLPSADLVINLTPDKQHTNVIEKVMPLMKKNACLSYSHGFNIVEEGMQIRKDLTVIMVAPKSPGTEVREEYKRGFGVPTLIAVHRENDPRGEGFELAKAYAAGTGGHRAGVLASSFVAEVKSDLMGEQTILCGVLQMGSILCYDKMIEQGVDAGYASKLIQYGWETITEALKHGGITNMMDRLSNPAKIMAFDLSEQLKEILAPLFNKHMDDIMGGEFSRTMMEDWANDDVNLLKWRAETAETAFEKSTCTNADIPEQEYFDKGILMIAMVKAGVELAYDTMVSAGIIEESAYYESLHEVPLIANLIARKKLYEMNVVISDTAEYGCYLFAHKAVPMLEDFMRTIDTQAIGKGLDPADNSVDNIRLIQVNEAIRDTSVEEVGKELRYYMSAMKPII

SEQ ID NO: 642 - protein, 490 aa, Geobacter sp.
MGENYFNTLPLRRQLQELGTCRFMDASEFANGCEYVKGKKIVIVGCGAQGLNQGLNMRDSGLDVSYTLRKEAIEQKRQSYLNASENGFKVGSYEELLPGADIVMNLAPDKQHSDVVATVIPFMKQGAVFSYAHGFNIVEEGTQIRKDLTVVMVAPKCPGSEVRAEYKRGFGVPTLIAVHGENDPNGDGLEIAKALASAQGGDRAGVLESSFVAEVKSDLMGEQTILCGMLQAGALLCFDKMTQNGIDAPYAVKLIQYGWETITEALKHGGITNMMDRLSNPAKLIAFKLADELKDIMRPLFQKHMDDIMSGEFSRTMMEDWANDDVKLLTWREQTGQTAFEKTEAAGEISEQEYFDKAILMVAMVKAGVELAFETMVQTGIEPESAYYESLHETPLIANTIARKKLYEMNRVISDTAEYGCYLFSHACVPLLKDFMSRVGTDVIGKGLTVKDNSVDNQLLVAVNAEIRSHLVEEIGAELRAAMKGMQKIV

SEQ ID NO: 643 - protein, 490 aa, Pseudoalteromonas sp.
MANYFNSLPLREQLAQLAQCEFMGADEFNDGVAALKGKKLVIVGCGAQGLNQGLNLRDSGLDVAYTLRDSAIAERRQSFLNASDNGFKVGTYEELIPTADVVLNLTPDKQHTAVVNAIMPLMKHGSTLAYSHGFNIVEEGMQVREDITVIMVAPKCPGSEVREEYKRGFGVPTLIAVHPENDPQGHGLAQAKAYAAGTGGHRAGVLKSSFIAEVKSDLMGEQTILCGMLQTGSILCFDKMIEKGIDAGYASKLIQYGWEVITEALKYGGVTNMLDRLSNPAKVKAFELSEELKVIMRPLYNKHQDDIIDGTFSRVMMEDWANDDANLLKWRAETAETHFEKTPAGDVEIAEQEFFDHGILMVAMVKAGVELAFETMTAAGIIAESAYYESLHETPLIANTIARKKLFEMNRTISDTAEYGCYLYNHACLPLLQEFMQGIDTDVIGKGLNEQSNQVDNQTLIQINTALREHPVEKVGAKLRGYMSAMKKIV

SEQ ID NO: 644 - protein, 490 aa, Geobacter sp.
MGQNYFNTLPLRRQLQELGTCRFMDASEFANGCEYVKGKKIVIVGCGAQGLNQGLNMRDSGLDVSYTLRKEAIEQKRQSYLNAADNGFKVGSYEELLPSADIVMNLTPDKQHTKVVETVIPFMKQGAVFSYAHGFNIVEEGTQIRKDLTVVMVAPKCPGSEVRAEYKRGFGVPTLIAVHGENDPNGDGLEIAKALASAQGGDRAGVLESSFVAEVKSDLMGEQTILCGMLQAGALLCFDKMTGNGIAAPYAVKLIQYGWETITEALKHGGITNMMDRLSNPAKLVAFKLAAELKDIMRPLFQKHMDDIMSGEFSRTMMEDWANDDVKLLTWREETGQTAFEKTEAAGEISEQEYFDKAILMVAMVKAGVELAFETMVQTGIEPESAYYESLHETPLIANTIARKKLYEMNRVISDTAEYGCYLFSHACVPLLKDFMAKVGTDVIGKGLDVKDNSVDNQLLVAVNAEIRIHLVEEVGAELRAAMKGMQKIV

SEQ ID NO: 645 - protein, 490 aa, Marinomonas mediterranea
MANYFNTLPLREQLEQLGKCRFMDSSEFADGVEALKGKKMVVIGCGAQGLNQGLNLRDSGLDVSYALREAAIAEKRQSWKNATENGFVVGTYEDLIPTADVVLNLTPDKQHTPVVKAVMPLMKEGACLSYSHGFNIVEEGMQIREDLTVIMVAPKCPGSEVRAEYVRGFGVPTLIAVHEDNDPKGEGLALAKAYAVGTGGHKAGVLMSSFIAEVKSDLMGEQTILCGMLQTGSILCFDKMVEEGIDAGYASKLIQYGWETVTEALKYGGVTNMLDRLSNPAKIKAFDLSEELKVIMRPLYNKHQDDIINGTFSRVMMEDWANDDKNLLGWRAETAETNFEKTPAGDVEISEQEFFDNGILMVAMVKAGVELAFETMTAAGIIAESAYYESLHETPLIANTIARKKLYEMNATISDTAEYGCYLYNHACLPLLGDFMKDIKTDVIGKGLDLEDTGVDNARLIEVNDALRSHPVEAIGGVLRGHMADMKKIV

SEQ ID NO: 646 - protein, 490 aa, Krokinobacter diaphorus
MNYFNTLPLRDQLAQLGKCRFMDASEFQDGIAAIEGKKIVIVGCGAQGLNQGLNMRDSGCDISYALREGAITDKRPSFVNASSNGFTVGTYQELIPSADLVLNLTPDKQHTAVVKAVMPLMKKGATLAYSHGFNIVEEGMEIREDLTVIMVAPKCPGSEVREEYKRGFGVPTLIAVHPNNDPEGKGLAQAKAYAAATGGHRAGVLESSFVAEVKSDLMGEQTILCGVLQTGSILCFDKMVEKGIDPAYAGKLIQYGWETITEALKHGGITTMIDRLNNPSKIKAFNLAEELKEIMRPLFEKHMDDIISGHFSKTMMEDWAADDKNLHKWRAATGETAFEKQTITTAEISEQEYFDHGVLMVAMVKAGVELAFETMTAAGIIEESAYYESLHETPLIANTIARKKLFEMNRIISDTAEYGCYLFDHACKPLLTDFMKRVDTNIIGSAFAKENDVDNQELIAVNDAIRNHPVEEIGATLRRAMVAMKKVKTA

SEQ ID NO: 647 - protein, 490 aa, Marinomonas posidonica
MANYFNTLPLREQLEQLGKCRFMDSSEFADGVDALKGKKMVVIGCGAQGLNQGLNLRDSGLDVSYALRPEAIAQKRQSWKNATENGFVVGTYEDLIPTADVVLNLTPDKQHTPVVKAVMPLMKEGACLSYSHGFNIVEEGMQIREDLTVIMVAPKCPGSEVRAEYVRGFGVPTLIAVHEDNDPKGEGLALAKAYAVGTGGHKAGVLMSSFIAEVKSDLMGEQTILCGMLQTGSILCFDKMVEEGIDAGYASKLIQYGWETVTEALKYGGVTNMLDRLSNPAKIKAFDLSEELKVIMRPLYNKHQDDIINGTFSRVMMEDWANDDKNLLGWRAETAETNFEKTPAGDVEISEQEFFDNGILMVAMVKAGVELAFETMTAAGIIAESAYYESLHETPLIANTIARKKLYEMNATISDTAEYGCYLYNHACLPLLGDFMKDIKTDVIGKGLDLEDTGVDNARLIEVNEALRSHPVEAIGGILRGHMADMKKIV

SEQ ID NO: 648 - protein, 490 aa, Pseudoalteromonas haloplanktis
MANYFNTLPLREQLAQLAQCEFMNADEFTDGVDALKGKKLVIVGCGAQGLNQGLNLRDSGLDVSYTLRDSAISERRQSFLNASENGFTVGTYQELIPTADVVLNLTPDKQHTSVVNAIMPLMKQGSTLAYSHGFNIVEEGMQVRDDITVIMVAPKCPGSEVREEYKRGFGVPTLIAVHPENDPQGHGLAQAKAYAAGTGGHRAGVLKSSFIAEVKSDLMGEQTILCGMLQTGSILCFDKMIEKGIDAGYASKLIQYGWEVITEALKYGGVTNMLDRLSNPAKVKAFELSEELKQIMRPLYNKHQDDIIDGTFSRTMMEDWNNDDANLLKWRAETAETHFEKTPAGNVEIAEQEFFDNGILMVAMVKAGVELAFETMTAAGIIAESAYYESLHETPLIANTIARKKLFEMNRTISDTAEYGCYLYNHACLPLLQDFMQKIDTDVIGKGLGEHSNQVDNQTLIQINTALREHPVEKVGATLRGYMSAMKKIV

SEQ ID NO: 649 - protein, 490 aa, Pelobacter carbinolicus
MGQNYFNSLPFRRQLQELGTCRFMDASEFANGCEYAKGKKIVIVGCGAQGLNQGLNMRDSGLDVSYTLRKGAIEEKRQSYLNATENGFAVGTYEEMLPTADIVMNLAPDKQHTDVVNTVVPLMKQGAVFSYAHGFNIVEEGTQIRKDLTVIMVAPKCPGSEVREEYKRGFGVPTLIAVHGENDPNGDGLEIAKALCSAQGGDRAGVLESSFVAEVKSDLMGEQTILCGMLQAGALLCFDKMTQNGIDAPYAVKLIQYGWETITEALKHGGITNMMDRLSNPAKLVAFGVAEELKEIMRPLFEKHMDDILSGEFSSTMMEDWANDDVKLLTWREETGKTAFEQTEGAGDISEQEYFDKAILMVAMVKAGVELAFEVMVSAGIEPESAYYESLHETPLIANTIARKKLYEMNRVISDTAEYGCYLFSHACVPLLQDFMEKVGTDLIGKGLDAKDNSVDNSTLVSVNAEIRSHLIEEVGEELRAAMQGMKAIV

SEQ ID NO: 650 - protein, 490 aa, Buchnera aphidicola
MKNFFNKLSFREKLIELNTGFLMNSNEFLHSKKKLKNKKIVIIGCGAQGLNQGLNLRDSGFNVTYALRKKSIENKSISWKNAIREKFFVDTYENLVPSADLVINLTPDKQHSVVVKKLQKLMKKNSVLGYSHGFNIVEIGEEIRSDITVIMVAPKCPGTEVRKEFLKGFGVPTLIAVHKKNDPKKIGLDIAKAWATGLGSHKAGILKSSFIAEVKSDLMGEQTILCGMLQACSLVCFNHLIEKGYSSDFSATLLQFGWEKLAECMKEGGITLLFNRLSISSKIRAYKLSIVLKSLLRPLFCLHMDNIISGDFSKNMIADWNNSDIQLYNWRKKLKKSHFENSNLYSNRKILDHEYFEKCTLMAAMLKDLKLCINTGITSASAYYESLHELPLIANTISRKRLYEMNLVISDTAEYGSHLFSERAISILNKFLKSINSDDLGETIRDTNITNSELLYVNDMIENHHIERIGKKLRLYMTNMKRTALHDCKN

SEQ ID NO: 651 - protein, 490 aa, Polaribacter sp.
MSNYFNTLTLRQKLEQLGKCRFMDASEFEDGVAALKGKKIVIVGCGAQGLNQGLNMRESGLDISYTLRQAAIDQKRESYTNAISNNFEVGTYEELLPTADLVINLTPDKQHTNVVKAVMPLMKKGATLSYSHGFNIVEEGMQIRKDLTVIMVAPKSPGSEVREEYKRGFGVPTLIAVHPENDPEQKGWAQAKAYAVATGGHKAGVLESSFVAEVKSDLMGEQTILCGLLQTGAILSFDKMVEEGIDAGYAAKLIQYGWETVTEALKHGGITNMMDRLSNPAKVEAFRLSEELKDIMRPLFQKHMDDIMTGHFSKTMMEDWANDDVNLLKWREATGETAFEKQQITDQEISEQEYFDHGTLLVAFVRAGVELAFEAMTESGIIDASAYYESLHETPLIANTIARKKLYEMNRVISDTAEYGCYLFDHACKPLLTDFMKTVSTNVIGKSFSSDNCVDNQELIKINKIIRNHPVEVVGEQLRASMTAMKVIKS

SEQ ID NO: 652 - protein, 490 aa, Congregibacter litoralis KT71
MGQNYFNTLPLRLQLEQLGKCRFMDASEFADGVDKLKGKKLVIVGCGAQGLNQGLNLRDSGLDVSYALRESAITEQRASWKNATDNGFTVGTYEDLIPTADVVLNLTPDKQHSAVVSAVMPLMKHGACLSYSHGFNIVEEGMQIRDDLTVIMVAPKCPGTEVREEYKRGFGVPTLIAVHTENDPNGDGMEIAKAYAVGTGGHRAGVLQSSFIAEVKSDLMGEQTILCGMLQTGSILCFDKMVEKGIDASYASKLIQYGWETVTEGLKHGGITNMMDRLSNPAKLRAFYLAEELRKIMRPLYEKHQDDIMTGEFSRTMMEDWANDDANLLKWRAATAETAFEKSENTSQEIGEQEFYDHGILMVAMVKAGVELAFETMVSAGIIDESAYYESLHETPLIANTIARKKLYEMNVVISDTAEYGCYLFDHACRPLLADFMKDIETDVIGGGLGDDNTVDNQELIRVNEAIRSHPVETVGTMLRGHMTAMKSIL

SEQ ID NO: 653 - protein, 490 aa, Desulfuromonas acetoxidans
MGQNYFNTLSMREKLDELGTCRFMDASEFAGGCEYAKGKKIVIVGCGAQGLNQGLNMRDSGLDVSYTLRKEAIAEKRQSYINATENGFTVGSYEELLPTADIVMNLAPDKQHTDVVNTVVPLMKQGATFSYAHGFNIVEEGTIIRKDLTVIMVAPKCPGSEVRAEYQRGFGVPTLIAVHKENDPNGDGLELAKALCSAQGGDRAGVLESSFVAEVKSDLMGEQTILCGMLQAGALLCFDKMVENGIEAPYAVKLIQYGWETITEALKHGGITNMMDRLSNPAKLEAYELAEELKEIMRPLFRKHMDDIITGVFSSTMMEDWANDDINLLTWREQTGQTAFEKTEAAGEISEQEYFDKAILMVAMVKAGVELAFESMVEVGIEPESAYYESLHETPLIANTIARKKLYEMNRVISDTAEYGCYLFAHACVPLLKDFMASVTTEVIGKGLDNVDTSVDNSTLVRVNADIRSHYIEEIGEELRDAMQGMKAIV

SEQ ID NO: 654 - protein, 490 aa, Unknown
  Alteromonadales bacterium
MANYFNTLPLREQLAQLAQCEFMDASEFTDGVNALKGKKLVIVGCGAQGLNQGLNLRDSGLDVSYTLRDSAIAERRQSFLNASENGFTVGTYQELIPTADVVLNLTPDKQHTSVVNAIMPLMKQGSTLAYSHGFNIVEEGMQVREDITVIMVAPKCPGSEVREEYKRGFGVPTLIAVHPENDPQGHGLAQAKAYAAGTGGDRAGVLKSSFIAEVKSDLMGEQTILCGMLQTGSILCFDKMIEKGIDAGYASKLIQFGWEVITEALKYGGVTNMLDRLSNPAKVKAFELSEELKVIMRPLYNKHQDDIIDGTFSRVMMEDWANDDANLLKWRAETAETNFEKTPAGDVEISEQEFFDNGILMVAMVKAGVELAFETMTAAGIIEESAYYESLHETPLIANTIARKKLFEMNRTISDTAEYGCYLYNHACLPLLADFMKNIDTDVIGKGLGEQSNQVDNKALIEINTALREHPVEIVGAKLRGYMSAMKKIV

SEQ ID NO: 655 - protein, 490 aa, Unknown
  Flavobacteria bacterium
MSNYFNQLSLRDQLHQLGQCRFMDASEFEDGIQILAGKKIVIVGCGAQGLNQGLNMRDSGLDISYALRDGAIEQKRASYQNAVSNDFNVGTYDVLIPSADMVINLTPDKNHTPVVKAVMPLMKKGATLSYSHGFNIVEEGTKVREDLTVIMVAPKCPGSEVREEYKRGFGVPTLIAVHPENDPQGHGLAQAKAYAFATGGHRAGVLESSFVAEVKSDLMGEQTILCGVLQTGSILSFDKMVEEGIDAAYAAKLIQYGWETITEALKHGGITNMMDRLSNPAKIKAFELSEQLKEILEPLFEKHMDDIMSGHFSKTMMEDWANDDKNLLSWRAETGETAFEKTPITDKEITDQEFFDHGILMVAFVRAGVELAFDTMVAAGIKEESAYYESLHETPLIANTIARKKLFEMNRIISDTAEYGCYLFDHAAKPMLTDFMKGIKKDVIGAGLITKDMGVDNKQLIDINEIIRYHPVEMIGYDLRASMVAMKKIV

SEQ ID NO: 656 - protein, 490 aa, Unknown
  marine gamma proteobacterium
MGQNYFNTLPLRLQLEELGKCRFMDRSEFANGCDYLKGKKIVIVGCGAQGLNQGLNLRDSGLDVSYTLREAAIVEQRQSWKNATENGFAVGTYEELIPGADVVMNLTPDKQHTPVVKTIMPLMKEGACLDYAHGFNLVEEGMQIRKDLTVVMTCPKCPGTEVREEYKRGFGVPTLIAVHRENDPKGEGMDIAKALASGTGGDRAGVLESSPIAEVKSDLMGEQTILCGMLQTGAILSFDKMVEKGIEPGYASKLIQFGWETVTEGLKHGGITNMMDRLSNPAKVRAFHLAEELKDIMRPLYEKHQDDIMSGEFSGTMMTDWANDDANLLGWRAATQETAFEKAENTDADISEQEYYDHGILLIAMCKAGVELAFEVMVQAGIKEESAYYESLHETPLIANTIARKKLYEMNVVISDTAEYGCYLFDHACRPLLADFMTKIDTDVIGKGISGGNDVDNAELIAVNREIRNHPVELIGAELRGYMTAMKRIL

SEQ ID NO: 657 - protein, 490 aa, Unknown
  gamma proteobacterium
MGQNYFNTLPLRLQLEQLGKCRFMDASEFADGVDRLRGKKLVIVGCGAQGLNQGLNLRDSGLDVSYALRESAIAEQRASFRNATENGFTVGTYEELIPAADLVLNLTPDKQHSAVVTAVMPLMKHGACLSYSHGFNIVEEGMQIREDLTVIMVAPKCPGTEVREEYKRGFGVPTLIAVHTENDPNGDGLEIAKAYAVGTGGHRAGVLQSSFIAEVKSDLMGEQTILCGMLQTGSILCFDKMVEKGIDAAYASKLIQYGWETITEGLKHGGITNMMDRLSNPAKLRAFYLAEELKGIMRSLYEKHQDDIMTGEFSRTMMEDWANDDINLLSWRAATAETAFEKSDNSSQEISEQEYYDHGILMVAMVKAGVELAFETMVAAGIIDESAYYESLHETPLIANTIARKKLYEMNVVISDTAEYGCYLFDHACRPLLADFMKNIETDVIGTGLGNDNTVDNQELIRVNDAIRSHPVETVGTMLRGHMTSMKSIL

SEQ ID NO: 658 - protein, 490 aa, Pseudoalteromonas haloplanktis
MANYFNTLPLREQLAQLAQCEFMDAGEFADGVDALKGKKLVIVGCGAQGLNQGLNLRDSGLDVSYTLRASAISERRQSFLNASENGFTVGTYEELIPTADVVLNLTPDKQHTAVVSAIMPLMKKGSTLAYSHGFNIVEEGMQVREDITVIMVAPKCPGSEVREEYKRGFGVPTLIAVHPENDPQGHGLAQAKAYAAGTGGHRAGVLKSSFIAEVKSDLMGEQTILCGMLQTGSILCFDKMIEKGVDAGYASKLIQYGWEVITEALKYGGVTNMLDRLSNPAKVKAFELSEELKLIMRPLYNKHQDDIIDGTFSRTMMEDWNNDDVNLLKWRAETAETNFEKTPAGDVEISEQEFFDNGILMVAMVKAGVELAFETMTAAGIIEESAYYESLHETPLIANTIARKKLFEMNRTISDTAEYGCYLYNHACLPLLADFMKKIDTDVIGKGLGEHSNQVDNQTLIQINAALREHPVEKVGAKLRGYMSAMKKIV

SEQ ID NO: 659 - protein, 490 aa, Shewanella sp.
MANYFNSLNLRQQLAQLGQCRFMDRSEFTDGCNYIKDWNIVILGCGAQGLNQGLNMRDSGLNIAYALRPEAIAQKRASWQKATDNGFRVGTFEELIPDADLVLNLTPDKQHSNVVNTVMPLMKQGSTLSYSHGFNIVEEGMQVRPDITVVMVAPKCPGTEVREEYKRGFGVPTLIAVHPENDPKGDGLEIAKAYASATGGDRAGVLLSSFIAEVKSDLMGEQTILCGMLQTGAVLGYDKMVADGVEPGYAAKLIQQGWETVTEALKHGGITNMMDRLSNPAKIKAFEIAEDLKEILQPLFEKHMDDIISGEFSRTMMQDWANDDANLLRWRAETGETGFENAPVSSEHIDEQTYFDKGIFLVAMIKAGVELAFDTMVSAGIVEESAYYESLHETPLIANTIARKRLYEMNVVISDTAEYGCYLFNHAAVPMLRDYVNAMSPEYLGAGLKDSSNSVDNLKLIAVNDAIRHTDVEYIGAELRGYMTEMKSIV

SEQ ID NO: 660 - protein, 489 aa, Unknown
  uncultured Oceanospirillales bacterium
MNYFNTLPLRLQLEQLGKCRFMDRSEFSDGVSKLKTKKVVIVGAGAQGLNQGLNMRDSGLDVSYALRESAISEQRASWKNATENGFVVGTYDELIPDADLVLNLTPDKQHSSVVEQIMPLMKQGASLAYSHGFNIVEEGMQIRDDITVVMVAPKCPGTEVREEYKRGFGVPTLIAVHAENDPNGDGMDIAKAYAAATGGHRAGVLESSFIAEVKSDLMGEQTILCGMLQTGSILCFNKMIEKNIDTAYASKLVQHGWEVISEGLKHGGISNMMDRLSNPAKLIANELTEELKQIMAPLYQKHMDNIITGNFSGGMMEDWARDDQKLLEWREATAETSFEKSTAGELEIPEQEYYDNGILMVAMIKAGVELAFETMTDSGIVEESAYYESLHEVPLIANLIGRKKLYEMNKVISDTAEYGCYLFSHECEPLLADFMTMMDTDVIGKGLQLNDLGVDNADLIIVNESIRSHPIEVVGKRLRKYMTAMKKVL

SEQ ID NO: 661 - protein, 489 aa, Buchnera aphidicola
MNYFNTLNFRQKINQIKKCRFMEKKEFNKKNEILKNKKIVIVGCGSQGLNQGLNMRDSGLNISYALRKNSILKKNQSWINATKNNFLVGDYESLIPNADLVINLTPDKQHSNVVKELQKLMKKDACLGYSHGFNIVEKLRNIRKDITVIMVAPKCPGTEVREEYKRGFGVGTLIAVHNENDYSNMGLEVAKAWAFSTGGHRAGVLESSFVAEVKSDLMGEQTILCGMLQTASLVCYEKLITTQNHPGYAGKLIQFGWETITESLKHGGITLMMDRLSNSSKIRAFKLSQEIKEFSQNLFQKHMDDIISGDFSSKMIQDWKNKDQNLLNWRYKTKNTSFEQSPDYDKKILEQEYYDHGILMVAILKAGIELSFETMIQSGIMEESAYYESLHELPLIANTIARKKLYEMNMVISDTAEYGNYLFSESAYPILKEFVKNINNTDLGSALPRNSVNNIELYNVNTMIRNHPIEIIGRKLRSYMKNMKTIIVG

SEQ ID NO: 662 - protein, 489 aa, Buchnera aphidicola
MNYFNSLNFRQKLINLRKCKLVEKNFFSKKCDILKRKNIVIVGCGSQGLNQGLNMRDSGLHVSYALRGSSILNKNKSWENATKNNFFVDTYENIIPTADLVINLTPDKQRKEVVTLLQKFMKENSVLGFSHGFHIVEIGQKIRNDITVIMVAPKCPGTEVREEYKKGFGVPSLIAVHMENDPKKIGFEIAKAWAYSLGSHRAGVLHSSFIAEVKSDLMGEQTILCGMLQTSSLVCYDQLVSQGKDPNYAGKLIQLGWESITESVKHGGITLMLNRLSNTAKIRAYILSKKLKVMFSSLFRKHMDDIISGEFSKNMIDDWNSDDKKLKEWRTQIKKTDFEKCKICHKEISEQEYFDQGLLMVAILKAGIELSFEIMVETGIKEESAYYESLHELPLIANTIARKRLYEMNLVISDTAEYGSYLFSQSAIPLLKEFMNELCPGDLGEKISDLQFDNVTLNKINHDIENHPVEIIGKKLRKYMVDMKPIKLS

SEQ ID NO: 663 - protein, 489 aa, Flavobacterium johnsoniae
MANYFNTLPLRLQLEQLGVCEFMEQSEFADGISALAGKKVVIVGCGAQGLNQGLNMRDSGLDISYALRADAIAEKRASYKNATENGFKVGTYEELIPTADLVCNLTPDKQHTSVVNAIMPLMKQGSTLAYSHGFNIVEEGMQIRKDITVIMCAPKCPGSEVREEYKRGFGVPTLIAVHPENDPNGFGLDQAKAYAVATGGHKAGVLRSSFVAEVKSDLMGEQTILCGLLQTGSILCFDKMVEKGIDAAYASKLIQYGWETITEALKHGGITNMMDRLNNPSKIEAYELAEELKDIMRPLFQKHQDDIISGEFSRTMMIDWANDDVNLLKWRAATGETNFEKTAPQEAPISEQEYFDNGVLMIAMVKAGVELAFETMTEAGIIEESAYYESLHELPLIANTIARKKLFEMNRVISDTAEYGCYLFDHACKPLLTEFMKKVETNIIGKPFSTSNGVDNTVLIAVNKEIRQHPIEEVGAWLRESMTAMKKIG

SEQ ID NO: 664 - protein, 489 aa, Capnocytophaga canimorsus
MKNYFNTLNFREKLAQLGVCELLQKSDFSQGVEALKGKKIVIVGAGAQGLNQGLNMRDSGLNVSYALRECAIAEKRPSYTNTIANGFQVGTFEELVPTADLVCNLTPDKQHTSVINKIMPLMKQGATLSYSHGFNIVEEGIEIRKDITVIMVAPKSPGSEVREEYKRGFGVPTLIAVHPKNDPENKGFEWAKAYATALGSDTAGVLRSSFVAEVKSDLMGEQTILCGLLQTGSILAFNKMKREGVAPEHAAKLIQYGWESITEALKHGGITNMMNRLSNPAKVRAFAISEDLKKMMRPLFEKHMDDILSGHFSKTMMEDWANNDKNLLTWRSATAETDFEKTPTTTEAIEEQTYFDYGTLLVAMVKSGVELAFEVMTESGIKAESAYYESLHELPLIANTIARKKLYEMNKTISDTAEYGCYLFDHECRPLIATYIDGLENNVIGRHFTVSNQIDNIDLIQVNKSIASHPIEVIGAHLRGYMTDMKRIK

SEQ ID NO: 665 - protein, 489 aa, Unknown
  marine gamma proteobacterium
MSNYFNTLPLRIQLEELGKCRFMDRAEFADGVDALRGKQIVIIGCGAQGLNQGLNLRDSGLDVAYALRPEAIAEKRASWQRATDNGFKVGDYEALIPTADVVMNLTPDKQHTPVVTAVMPLMKQGACLDYAHGFNLVEEGMQVRKDITVVMMCPKCPGTEVREEYKRGFGVPTLIAVHRENDPQGDGMAIAKALAAGTGAHKAGVLESSPIAEVKSDLMGEQTILCGMLQSGSLLCYDRMVALGTDPGYAAKLVQYGWETVTEGLKQGGITNMMDRLSNPAKIKAFELSDTMKDILRPLFEKHQDDIMSGVFSSTMMADWAQDDANLLKWRAETNETAFEKQALTDNEITEQEYYDKGILMIAMVKAGVELAFETMVDAGIIEESAYYESLHETPLIANTIARKKLYEMNVVISDTAEYGCYLFDQAARPLLAEFMQSVGSDVIGGGMIGDNGVDNKTLIEVNAEIRNHTVELVGEELRGYMTEMKSIV

SEQ ID NO: 666 - protein, 489 aa, Lentisphaera araneosa
MNYYNTLPQRIKLEELGTCRFMSKSEFNGVEKLKGKKIVIVGCGAQGLNQGLNLRDSGLDVSYALRGAAIESKRQSFLNATENGFVVGTYEELIPSADLVANLTPDKQHTNVVETVMPLMKDGSTLLYSHGFNVVEEGMQIREDITVVMVAPKSPGSEVRNEYKRGFGVPTLIAVHRENNPNGDGLDIAKAYCCGTGGDRAGVLMSSFVAEVKSDLMGEQTILCGLLQAGSILSFNKMVEEGIDAGWASKFIQYGWETITEALKIGGVSGMVDRLSNPAKVKCFELITELKTIMRPLFEKHMDDIIEGDFSEGMMADWAKDDIKLLTWREETGQTDFEKTPAGDVEISEQEYFDKGVLMVAFVAAGVDLAFDAMVEAGIKEESAYYESLHETPLIANTIARKKLYEMNRVISDTAEYGCYLFSHACVPLLTDFMKSIDTSVIGKEYNEGGSNSVNNKQIVEINRALRSTGCEKVGEELRGYMTAMKEII

SEQ ID NO: 667 - protein, 489 aa, Unknown
  unidentified eubacterium
MENYFNTLSLREQLSQLGKCDLMDKAAFNNGVKPLLDKKIVIIGCGAQGLNQGLNMKDSGLDVSFTLRESAISEQRASYKNALENDFKVGTYKEMIPTADLVINLTPDKQHTDVVSKVMPLMKKGATLSYSHGFNIVEEGITIREDLTVIMMAPKSPGSEVREEFKRGFGVPTLIAVHPENDPKGKGLKLAKAYAVATGGDKAGVLHSSFVAEVKSDLMGEQTILCGVLQSASILCFDKMLEKGLDKNYAAKLIQYGWETLTEALKQGGLTNMMDRLSNPAKIKAYELAEELKTTMKPLFQKHMDDIMSGEFSKGMMKDWGNNDNDLLKWRKETADTNFEKTKVTEEFISEQEYFDHGTLLAAFLKAGVELAYETMTQTGIKAESAYYESLHEAPLIANTIARKKLYEMNRVISDTAEYGCYLFDHACKPLLKDFMSTVELTLIGKPFSANNQVDNKKLIAVNKAVRNHSIEKIGEQLRTSMTAMKNLN

SEQ ID NO: 668 - protein, 488 aa, Buchnera aphidicola
MKNYFNSLNFRNQLKELRTGFLLNKNEFFKKTEALHKKNIVIVGCGAQGLNQGLNLRDSGLSVSFALRKESIKNKSLSWRNAIKNNFLVDTYKKLVPNADFVINLTPDKEHSVVVKKLQKLMKKNSILGYSHGFNIVEMGEKIRSDITVIMVAPKCPGTEVRQEFLKGFGVPALIAVHKDNNPDAKGLEFAKAWAVGLGSHKAGVLHSSFIAEVKSDLMGEQTILCGMLQACSLVCYEHLISKGYDTKYSVTLLQFGWEKLTEVMKLGGITLLLDRISSSAKIRVHELSLELKKILRPLYRLHMDNIISGQFSEKMIKDWKNNDIELYTWRKELQDSDFEKSHLYDHRTIKDQEYFEKCTLMIAMLKSGIELSFETMIETGITKESAYYESLHELPLIANTIARKRLYEMNMVISDTAEYGNYLFSSNAIPLLRKFMTSLKSSDLGESIIDSNVNNNTLLSLNNDIQNHKIEKIGKHLRSYMQKMKQI

SEQ ID NO: 669 - protein, 476 aa, Psychroflexus torquis
MESSEFEGGVKVLKGKKIVIVGCGAQGLNQGLNMRDSGLDISYALRQAAIDEERDSFKNAKSNDFRVGTYRELIPEADLVLNLTPDKQHTHVIKSIMPLMKTGSTLSYSHGFNIVEEGMDIRKDITVIMVAPKCPGTEVREEYKRGFGVPTLIAVHPENDPEQKGWEQAKAYAVGTGGDKAGVLESSFIAEVKSDLMGEQTILCGVLQTGAILSFDKMIDEGIEPSYAVKLIQYGWETITEALKHGGITNMMDRLSNSSKIKAFKLSEELKTILRPLFEKHMDDILSGHFSKTMMEDWANDDANLLKWRAETGETAFEKTKLTEAHINEQEYFDNAVLLVAFAKSGVELAFETMVSAGIIEDSAYYESLHELPLIANTIARKKLFEMNRVISDTAEYGCYLFDHASKPLLADFMESLDTSVIGQPYPNADELDNIKLIEVNAEIRNHPIEKVGKRLRTAMIAMKGLKKESKEKVTL

SEQ ID NO: 670 - protein, 469 aa, Escherichia coli
MGRDEFADGASYLQGKKVVIVGCGAQGLNQGLNMRDSGLDISYALRKEAIAEKRASWRKATENGFKVGTYEELIPQADLVINLTPDKQHSDVVRTVQPLMKDGAALGYSHGFNIVEVGEQIRKDITVVMVAPKCPGTEVREEYKRGFGVPTLIAVHPENDPKGEGMAIAKAWAAATGGHRAGVLESSFVAEVKSDLMGEQTILCGMLQAGSLLCFDKLVEEGTDPAYAEKLIQFGWETITEALKQGGITLMMDRLSNPAKLRAYALSEQLKEIMAPLFQKHMDDIISGEFSSGMMADWANDDKKLLTWREETGKTAFETAPQYEGKIGEQEYFDKGVLMIAMVKAGVELAFETMVDSGIIEESAYYESLHELPLIANTIARKRLYEMNVVISDTAEYGNYLFSYACVPLLKPFMAELQPGDLGKAIPEGAVDNGQLRDVNEAIRSHAIEQVGKKLRGYMTDMKRIAVAG

SEQ ID NO: 671 - protein, 469 aa, Zunongwangia profunda
MELDEFSDGVAALKDKKIVIVGCGSQGLNQGLNMRDSGLDISYALRDGAIKEKRQSYKNATENNFTVGTYEELIPSADLVINLTPDKQHTGVIKAIMPHIKKDGVLSYSHGFNIVEEGMQIREDITVIMVAPKCPGSEVREEYKRGFGVPTLIAVHPENDHLGIGLEWAKAYAYGTGGHKAGVLQSSFVAEVKSDLMGEQTILCGLLQTGSILSFDKMVADGVSPDYAAKLIQYGWETITEALKHGGITNMMDRLSNPAKIKAFEISEELKEIMRPLFQKHMDDIISGEFSSRMMRDWSNDDKELLEWRAATGETAFEKTEASEEEISEQEYFDKGVLMVAMVKSGVELAFETMVEAGIIAESAYYESLHETPLIANTIARKKLFEMNRIISDTAEYGCYLFDHSCKPLIKDYVNGLDKDFIGHAYGTEETGVDNLELIAVNDALRQHPVEIVGAKLRKAMTAMKRIHE

SEQ ID NO: 672 - protein, 467 aa, Unknown
  gamma proteobacterium
MDSSEFSDGVEKLKGKKLVIVGCGAQGLNQGLNLRDSGLDVSYTLRAEAIAEKRQSWKNATDNGFTVGTYEELIPTADMVLNLTPDKQHSAVVSQVMPLMKHGACLSYSHGFNIVEEGMQIREDITVIMVAPKCPGTEVREEYKRGFGVPTLIAVHTENDPNGEGLELAKAYAVGTGGHRAGVLQSSFIAEVKSDLMGEQTILCGMLQTGSILCFDKMVESGIDSGYASKLIQYGWETVTEGLKQGGITNMMDRLSNPAKLRAFYLAEELKEIMRPLYEKHQDDIITGEFSSTMMADWDNDDANLLKWRAATAETAFEKAENTTQEISEQEFYDKGILMVAMVKAGVELAFETMVAAGIIAESAYYESLHETPLIANTIARRKLYEMNVVISDTAEYGCYLFDHACRPLLADFMSKITIDVIGQGIGSDNTVDNRELIAANEAIRNHPVEVVGKKLRGYMTAMKSLA

SEQ ID NO: 673 - protein, 463 aa, Salmonella enterica
ADGASYLQGKKVVIVGCGAQGLNQGLNMRDSGLDISYALRKEAIAEKRASWRKATENGFKVGTYEELIPQADLVVNLTPDKQHSDVVRSVQPLMKDGAALGYSHGFNIVEVGEQIRKDITVVMVAPKCPGTEVREEYKRGFGVPTLIAVHPENDPKGEGMAIAKAWAAATGGHRAGVLESSFVAEVKSDLMGEQTILCGMLQAGSLLCFDKLVAEGTDPAYAEKLIQFGWETITEALKQGGITLMMDRLSNPAKLRAYALSEQLKEIMAPLFQKHMDDIISGEFSSGMMADWANDDKKLLTWREETGKTAFETAPQFEGKIGEQEYFDKGVLMIAMVKAGVELAFETMVDSGIIEESAYYESLHELPLIANTIARKRLYEMNVVISDTAEYGNYLFSYACVPLLKPFMAELQPGDLGSAIPEGAVDNAQLRDVNDAIRSHAIEQVGKKLRGYMTDMKRIAVAG

SEQ ID NO: 674 - protein, 452 aa, Salmonella enterica
MANYFNTLNLRQQLAQLGKCRFMGRDEFADGASYLQGKKVVIVGCGAQGLNQGLNMRDSGLDISYALRKEAIAEKRASWRKATENGFKVGTYEELIPQADLVVNLTPDKQHSDVVRSVQPLMKDGAALGYSHGFNIVEVGEQIRKDITVVMVAPKCPGTEVREEYKRGFGVPTLIAVHPENDPKGEGMAIAKAWAAATGGHRAGVLESSFVAEVKSDLMGEQTILCGMLQAGSLLCFDKLVAEGTDPAYAEKLIQFGWETITEALKQGGITLMMDRLSNPAKLRAYALSEQLKEIMAPLFQKHMDDIISGEFSSGMMADWANDDKKLLTWREETGKTAFETAPQFEGKIGEQEYFDKGVLMIAMVKAGVELAFETMVDSGIIEESAYYESLHELPLIANTIARKRLYEMNVVISDTAEYGNYLFSYACVPLLKPFMAELQPGDLGSAIPKAR

SEQ ID NO: 675 - protein, 450 aa, Haemophilus influenzae
MGCGAQGLNQGLNMRDSGLDISYALRPEAIAEKRASFQRATENGFKVGTYEELIPTADLVVNLTPDKQHSKVVADVMPLMKKDSAFGYSHGFNIVEVGEEIRKDITVVMVAPKCPGTEVREEYKRGFGVPTLIAVHPENDPKGEGMAIAKAWAAATGGHKAGVLESSFVAEVKSDLMGEQTILCGMLQAGSIVCYDKLVADGKDPAYAGKLIQYGWETITEALKQGGITLMMDRLSNSAKLRAFELAEQIKESLGFLYYKHMDDIISGHFSATMMADWANGDKDLFAWREATGKTAFENAPKYDGKISEQEYFDNGVLMIAMVKAGVELAFEAMVASGIYEESAYYESLHELPLIANTIARKRLYEMNVVISDTAEYGNYLFSNVATPILAKEIIPNLQKGDLGEPTPAVEVDNITLRDVNDAIRNHPVELIGQELRGYMTDMKRIAVAG

SEQ ID NO: 676 - protein, 442 aa, Pasteurella multocida
MNQGLNMRDSGLDISYALRPEAIAEKRASFQRATENGFNVGTYDELIPSADLVVNLTPDKQHSKVVADVMPLMKQGAALGYSHGLNIVEVGEQIRKDITVVMVAPKCPGTEVREEYKRGFGVPTLIAVHPENDPNGDGLEIAKAWAAATGGHRAGVLESSFVAEVKSDLMGEQTILCGMLQAGSIVCYDKLVADGKDPAYAGKLIQYGWETITEALKQGGITLMMDRLSNSAKLRAFELSEQIKAKLTFLFEKHMDDIISGEFSATMMADWENGDANLLKWREETGKTAFENAPKYEGKISEQEYFDHGVLMVAMVKAGVELAFDTMVASGIYEESAYYESLHELPLIANTIARKRLYEMNVVISDTAEYGNYLFANVATPILAKEIMPTLQKGDLGEPTPTVEIYNITLRDVNDAIRNHPIELIGQELRGYMTDMKRISSH

SEQ ID NO: 677 - DNA, 32 bp, Artificial Sequence
  Sh_S78D_for primer
gcacaaaagagagccgattggcaaaaagcgac

SEQ ID NO: 678 - DNA, 32 bp, Artificial Sequence
  Sh_ S78D_rev primer
gtcgctttttgccaatcggctctcttttgtgc

SEQ ID NO: 679 - DNA, 35 bp, Artificial Sequence
  Se2_S78D_for primer
gcagaaaagagagccgattggcgtaaagcgacgga

SEQ ID NO: 680 - DNA, 35 bp, Artificial Sequence
  Se2_S78D_rev primer
tccgtcgctttacgccaatcggctctcttttctgc

What is claimed is:

1. A recombinant yeast microorganism comprising an engineered metabolic pathway for producing isobutanol, wherein said engineered metabolic pathway comprises the following pathway steps:
(a) pyruvate to acetolactate;
(b) acetolactate to 2,3-dihydroxyisovalerate;
(c) 2,3-dihydroxyisovalerate to α-ketoisovalerate;
(d) α-ketoisovalerate to isobutyraldehyde; and
(e) isobutyraldehyde to isobutanol,
wherein the recombinant yeast microorganism expresses:
(i) a modified class II ketol-acid reductoisomerase (KARI), wherein said modified class II KARI is derived from an unmodified class II KARI that has been engineered to comprise an amino acid substitution corresponding to amino acid residue Ser78 of the E. coli KARI (SEQ ID NO: 13), and wherein said modified class II KARI exhibits an increased ability to use NADH as a cofactor to catalyze the conversion of acetolactate to 2,3-dihydroxyisovalerate as compared to a corresponding unmodified class II KAR1; and
(ii) an exogenously encoded alcohol dehydrogenase that is naturally NADH-dependent, wherein the alcohol dehydrogenase catalyzes the conversion of isobutyraldehyde to isobutanol.

2. The recombinant yeast microorganism of claim 1, wherein the amino acid residue corresponding to Ser78 of the E. coli ketol-acid reductoisomerase (SEQ ID NO: 13) is replaced with an amino acid residue selected from the group consisting of aspartic acid and glutamic acid.

3. The recombinant yeast microorganism of claim 1, wherein said unmodified class II KARI is derived from a genus selected from the group consisting of Escherichia, Shigella, Yersinia, Klebsiella, Vibrio, Providencia, Haemophilus, Shewanella, and Salmonella.

4. The recombinant yeast microorganism of claim 1, wherein said unmodified class II KARI comprises SEQ ID NO: 13.

5. The recombinant yeast microorganism of claim 1, wherein said unmodified class II KARI comprises an amino acid sequence selected from the group consisting of SEQ ID NOs: 331-676.

6. The recombinant yeast microorganism of claim 1, wherein the enzyme that catalyzes the conversion of pyruvate to acetolactate is an acetolactate synthase.

7. The recombinant yeast microorganism of claim 6, wherein said acetolactate synthase is derived from Bacillus subtilis.

8. The recombinant yeast microorganism of claim 1, wherein the enzyme that catalyzes the conversion of 2,3-dihydroxyisovalerate to α-ketoisovalerate is a dihydroxy acid dehydratase.

9. The recombinant yeast microorganism of claim 1, wherein the enzyme that catalyzes the conversion of α-ketoisovalerate to isobutyraldehyde is a 2-keto acid decarboxylase.

10. The recombinant yeast microorganism of claim 9, wherein said 2-keto acid decarboxylase is derived from Lactococcus lactis.

11. The recombinant yeast microorganism of claim 1, wherein said alcohol dehydrogenase is encoded by a gene selected from the group consisting of the Lactococcus lactis adhA, the Drosophila melanogaster ADH, the Klebsiella pneumoniae dhaT, and the Escherichia coli fucO.

12. The recombinant yeast microorganism of claim 1, wherein said recombinant yeast microorganism has been engineered to reduce or eliminate pyruvate decarboxylase (PDC) activity.

13. The recombinant yeast microorganism of claim 1, wherein said recombinant yeast microorganism has been engineered to reduce or eliminate glycerol-3-phosphate dehydrogenase (GPD) activity.

14. The recombinant yeast microorganism of claim 1, wherein said modified class II, KARI is encoded by a nucleic acid molecule which has been codon-optimized for expression in yeast.

15. A method of producing isobutanol, said method comprising:
(a) providing a recombinant yeast microorganism according to claim 1;
(b) cultivating the recombinant yeast microorganism in a culture medium containing a feedstock providing a carbon source until the isobutanol is produced.

16. The method of claim 15, wherein said recombinant yeast microorganism is cultivated under anaerobic conditions.
